(19) United States
(12) Patent Application Publication
(10) Pub. No.: US 2006/0257420 A1
(43) Pub. Date: Nov. 16, 2006

(54) Methods of preparation and composition of peptide constructs useful for treatment of autoimmune and transplant related host versus graft conditions

(75) Inventor: Daniel H. Zimmerman, Bethesda, MD (US)

Correspondence Address: HAHN & VOIGHT PLLC, 1012 14TH STREET, NW, SUITE 620, WASHINGTON, DC, 20005, US

(73) Assignee: CEL-SCI Corporation, Vienna, VA (US)

(21) Appl. No.: 11/443,314

(22) Filed: May 31, 2006

Related U.S. Application Data
(63) Continuation-in-part of application No. 11/298,718, filed on Dec. 12, 2005.
Application No. 11/298,718 is a continuation of application No. 10/111,645, filed on Apr. 26, 2002, now Pat. No. 6,995,237.

(51) Int. Cl. A61K 39/00; C07K 14/47

(52) U.S. Cl. 424/185.1; 530/324

(57) ABSTRACT

The invention is related to peptide constructs, i.e., polypeptides obtained by linking together two or more peptides based on or derived from different molecules, which are useful in the treatment or prevention of autoimmune diseases, asthma, allergies, and host versus graft (or graft versus host) rejection, as well as to compositions containing same, methods for producing same and methods for using same; wherein the peptide constructs have the formula
P₁-x-P₂ where
P₁ is a peptide associated with autoimmune disease, allergy, asthma, host-versus-graft rejection, myocarditis, diabetes, and immune-mediated disease, which binds to an antigen receptor on a set or subset of T cells;
P₂ is a peptide which will cause a Tₕ2 directed immune response by the set or subset of T cells to which the peptide P₁ is attached or which will bind to a T cell receptor which will cause the set or subset of T cells to which the peptide P₁ is attached to initiate, but not complete, an immune response causing the set or subset of T cells to undergo anergy and apoptosis; and
   x is a direct bond or linker for covalently bonding P₁ and P₂.

[0001] This invention is a continuation-in-part application of U.S. patent application Ser. No. 11/298,718 filed on Dec. 12, 2005, which is a continuation of U.S. patent application Ser. No. 10/111,645 having a § 371 date of Apr. 26, 2002, now U.S. Pat. No. 6,995,237, the content of which is incorporated herein by reference. Two compact discs required under Rule § 1.821(c) and (e) are made part of the specification. The first compact disc is the “Sequence Listing” and is an exact duplicate of the second compact disc, which is the Computer Readable Copy (CRF) required under Rule § 1.821(e). The subject matter of the “Sequence Listing” is incorporated herein by reference

### INTRODUCTION

[0002] The invention is related to peptide constructs, i.e., polypeptides obtained by linking together two or more peptides based on or derived from different molecules, which are useful in the treatment or prevention of autoimmune diseases, asthma, allergies, and host versus graft (or graft versus host) rejection, as well as to compositions containing same, methods for producing same and methods for using same.

### BACKGROUND

[0003] Autoimmune conditions are characterized by the body attacking itself by mounting an immune response against itself. The goal of these treatments is to turn off, dampen or redirect this inappropriate immune response. The goal of a vaccination approach is to eliminate, reduce or redirect an immune response against self-antigens. As noted by a recent Institutes of Medicine report, autoimmune diseases are a major target area proposed for vaccines and are the third major area for expenditure of healthcare in the US behind cancer and cardiovascular diseases.

[0004] Various antigens often with defined epitopes recognized for some Human Leukocyte Antigens (HLA) genotypes, have been identified, including those associated with Insulin Dependent Diabetes Mellitis (IDDM), Rheumatoid Arthritis (RA) (e.g. collagen type II 390-402 IAGFKGEQGPKGE (SEQ ID NO.1) wherein amino acids are provided in PRT/1 code shown in Table D-1 of Appendix D of User's Manual for PatentIn 3.3 (Version 2.4), Computer Sciences Corporation (Jul. 30, 2004), Systemic Lupus Erythematousis (SLE), Ankyosing Spondylitis (AS), Pemphigus Vulgaris (PV) (epidermal cell adhesion molecule desmoglein 190-204), Multiple Sclerosis (MS), Myelinproteolipid (MPL) (peptide sequence KNIVTPRT (SEQ ID NO.2), certain types of psoriasis, and uveoretinitis (Hammer et al., HLA class I peptide binding specificity and autoimmunity. 1997, Adv. Immunol, 66:67 Tisch et al., Induction of Glutamic Acid Decarboxylase 65-Specific Th2 Cells and Suppression of Autoimmune Diabetes at Late Stages of Disease Is Epitope Dependent 1999, J. Immunol. 163:1178; Yoon et al., Control of Autoimmune Diabetes in NOD Mice by GAD Expression or Suppression in β Cells 1999, Science 284:1183; Ruiz et al., Suppressive Immunization with DNA Encoding a Self-Peptide Prevents Autoimmune Disease: Modulation of T Cell Costimulation 1999, J. Immunol., 162:3336; Krco et al., Identification of T Cell Determinants on Human Type II Collagen Recognized by HLA-DQ8 and HLA-DQ6Transgenic Mice 1999, J. Immunol., 163:1661). In other cases, peptides are known that induce in animals, a condition similar to ones found in humans, such as GDKVSFFCKNKEKKC (SEQ ID NO.3) for antiphospholipid antibodies associated with thrombosis (Gharavi et al., GDKV-Induced Antiphospholipid Antibodies Enhance Thrombosis and Activate Endothelial Cells In Vivo and In Vitro 1999, J. Immunol., 163:2922) or myelin peptides for experimental autoimmune encephalitis (EAE) as a model for MS (Ruiz et al., supra, Araga et al., A Complementary Peptide Vaccine That Induces T Cell Anergy and Prevents Experimental Allergic Neuritis in Lewis Rats 1999, J. Immunol., 163:476-482; Karin et al., Short Peptide-Based Tolerogens Without Self-Antigenic or Pathogenic Activity Reverse Autoimmune Disease 1999, J. Immunol., 160:5188; Howard et al., Mechanisms of immunotherapeutic intervention by anti-CD40L (CD154) antibody in an animal model of multiple sclerosis 1999, J. Clin. Invest., 103:281).

[0005] Moreover, glutamic acid decarboxylase (GAD) and specific peptides have been identified associated with IDDM (Tisch et al., supra; Yoon et al., supra). Many of these conditions are also characterized by elevated levels of one or more different cytokines and other effectors such as Tumor Necrosis Factor (TNF) (Kleinau et al., Importance of CD23 for Collagen-Induced Arthritis: Delayed Onset and Reduced Severity in CD23-Deficient Mice 1999, J. Immunol. 162:4266; Preckel et al., Partial agonism and independent modulation of T cell receptor and CD8 in hapten-specific cytotoxic T cells 1998, Eur. J. Immunol., 28:3706; Wooley et al., Influence of a recombinant human soluble tumor necrosis factor receptor FC fusion protein on type II collagen-induced arthritis in mice 1993, J. Immunol., 151:6602) as well as auto-antibodies, including in some cases, anti-costimulator molecules, in particular, those for Cytotoxic T-lymphocyte-Associated protein 4 ((CTLA-4) (CD152)) on CD4+ cells (Matsui et al., Autoantibodies to T Cell Costimulatory Molecules in Systemic Autoimmune Diseases 1999, J. Immunol., 162:4328).

[0006] Efforts are underway to attack cells or cellular products of the immune system and thereby treat autoimmune conditions, allergies, asthma and transplantation rejection using as reagents presumptive antigenic peptides or proteins, peptides representing certain T cells, monoclonal antibodies (Mabs) or recombinant proteins binding various effector cells or molecules such as Tumor Necrosis Factor Alpha (TNFα) and IgE.

[0007] The following immunomodulatory approaches are contrasted with the mode of action for antigen specific products. For example, a fusion protein LFA-3TIP (Amevive™ from Biogen), purportedly a molecule composed of the first extracellular domain of LFA-3 fused to the hinge (CH2 and CH3 domains of human IgG1=TIP) which targets the CD2 receptor on T cells is being evaluated for psoriasis and for xeno- and allograft rejection. LFA-3TIP is bi-functional (i.e., two identical LFA-3 regions and TIP) and therefore is a complex conjugate molecule. According to Biogen, LFA-3TIP is a recombinant fusion protein designed to modulate the immune response by blocking the cellular pathway that activates T cells. Presumably, the compound is acting on a subset of memory effector cells with a down modulation or re-direction of modulation activity.

[0008] Other antigen non-specific approaches also utilize monoclonal antibodies that act on activated T cells and down regulate them such as using anti-CD3 (Protein Design Laboratories) or blocking Antigen Presenting Cells (APC) and T cell interaction by anti-Intercellular Adhesion Molecule 3 ((ICAM-3) (ICOS)). Another such example is MEDI-507 (Medimmune) which is believed to be a humanized monoclonal antibody for psoriasis that also targets CD2 presumably for removing or inactivating those cell types. Other diseases such as tissue transplantation rejection and allergies are also being tested by this approach.

[0009] In contrast to acting on cell surface markers such as ICAM-3, peptide rhu-Mab-E25 (Genentech) binds to circulating IgE with the goal of preventing activation of mast cells. rhu-Mab-E25 is believed to be a humanized monoclonal antibody against IgE. Other researchers are developing monoclonal antibodies to act directly on agents causing disease symptoms. Remicade Infliximab (Centocor) is purported to be a monoclonal antibody to TNFα while anti CD40 ligand has been used for treatment in animal model of MS (Howard et al., supra). A recombinant generated designed protein Enbrel (Immunex) is purported to comprise two molecules of r-DNA derived TNFα soluble receptor, and is intended to block TNFα's action.

[0010] It should be noted, however, that many of these agents are not disease specific and often recognize and could disadvantageously affect normal cellular and body constituents that have a defined and necessary role in needed normal immune defenses.

[0011] One example of an antigen disease specific approach is to treat MS patients by oral administration of myelin proteins. Collagen type II for treatment of patients with Rheumatoid Arthritis can also be used. These treatments are designed to target the Gut Associated Lymphoid Tissues (GALT) to induce tolerance by antigen specific suppression of the immune system. It is not known if these treatments would use the intact protein or a hydrolyzate containing smaller peptides; Wucherpfennig et al., Shared human T cell receptor V beta usage to immunodominant regions of myelin basic protein. 1990, Science, 248:1016; Ota et al., T-cell recognition of an immunodominant myelin basic protein epitope in multiple sclerosis 1990, Nature, 346; 183).

[0012] A related approach to treat autoimmune conditions is the use of an oral formulation of peptide(s) as immunogen given in large quantities. The peptide represents a sequence that is thought to be the autoimmune epitope itself or a modified form which may have altered binding or improved stability properties. By use of the peptide it is believed that either the normal peptide or an Altered Peptide Ligand (APL) will bind to the T cell receptor (TCR) and induce a state of anergy with an antigen presenting cell (APC) (Faith et al., An Altered Peptide Ligand Specifically Inhibits Th2 Cytokine Synthesis by Abrogating TCR Signaling 1999, J. Immunol., 162:1836; Soares et al., Differential Activation of T Cells by Natural Antigen Peptide Analogues: Influence on Autoimmune and Alloimmune In Vivo T Cell Responses 1998, J. Immunol., 160:4768; Croft et al., Partial activation of naive CD4 T cells and tolerance induction in response to peptide presented by resting B cells 1997, J. Immunol., 159:3257, Ding et al., Differential Effects of CD28 Engagement and IL-12 on T Cell Activation by Altered Peptide Ligands 1998, J. Immunol., 161:6614; Hin et al., Cutting Edge: N-Hydroxy Peptides: A New Class of TCR Antagonists 1999, J. Immunol., 163:2363). Some of the approaches with APL include using related amino acids such a D amino acids (Koch et al., A Synthetic CD4-CDR3 Peptide Analog Enhances Skin Allograft Survival Across a MHC Class II Barrier 1998, J. Immunol., 161:421), amino acids with substituted side chains (Palma et al., Use of Antagonist Peptides to Inhibit In Vitro T Cell Responses to Par j1, the Major Allergen of Parietaria judaica Pollen 1999, J. Immunol., 162:1982), methylene groups to replace peptide bonds in the peptide backbone (Meda et al., Beta-amyloid (25-35) peptide and IFN-gamma synergistically induce the production of the chemotactic cytokine MCP-1/JE in monocytes and microglial cells 1996, J. Immunol., 157:1213) and N-hydroxyl peptides (Hin et al., supra).

[0013] Various substitutions of side chains of the Major Histocompatibility Complex (MHC) and T cell receptor (TCR) molecules have also been contemplated by the prior art (Clay et al., Changes in the Fine Specificity of gp100₍₂₀₉₋₂₁₇₎-Reactive T Cells in Patients Following Vaccination with a Peptide Modified at an HLA-A2.1 Anchor Residue 1999, J. Immunol., 162:1749). For example, with insulin activity it has been shown that a one amino acid change on the α-chain can abolish its oral immune tolerance activity in two (2) mechanistically different IDDM murine models (Homann et al., Insulin in Oral Immune “Tolerance”: A One-Amino Acid Change in the B Chain Makes the Difference 1999, J. Immunol., 163:1833). Although not an autoimmune epitope, a single change from threonine to alanine can abolish biological activity (Sutherland et al., An 11-Amino Acid Sequence in the Cytoplasmic Domain of CD40 Is Sufficient for Activation of c-Jun N-Terminal Kinase, Activation of MAPKAP Kinase-2, Phosphorylation of ImBc, and Protection of WEHI-231 Cells from Anti-IgM-Induced Growth Arrest 1999, J. Immunol., 162:4720) while a switch from phenylalanine to alanine converts the bee venom phospholipase to an inactive form (Faith et al., supra) as does a switch from tyrosine to alanine convert from active to inactive for another system (Hausman et al., Peptide Recognition by Two HLA-A2/Tax₁₁₋₁₉-Specific T Cell Clones in Relationship to Their MHC/Peptide/TCR Crystal Structures 1999, J. Immunol., 162:5389).

[0014] In yet another approach based on peptide materials, truncated peptides of autoimmune inducing epitope are used as an antagonist in an animal model to treat a particular condition (Karin et al. supra). Synthetic amino acid polymers that are thought to represent epitopes which contain Tyrosine (Y), Glutamic acid (E), alanine (A) and lysine (K) to target T cells such as Copolymer 1 have been contemplated. For example, Copaxone has been used as an oral tolerance delivery approach to treat MS patients where Copaxone is believed to be a synthetic copolymer of four amino acids (Hafler et al., supra 1988, J. Immunol., 141:131). Modified peptides of peptide epitopes are also being studied for treatment of various autoimmune conditions including MS and PV (desmoglein-3) (Hammer, et al., supra 1997, Adv. Immunol., 66:67; Wucherpfennig et al., Structural Basis for Major Histocompatibility Complex (MHC)-Linked Susceptibility to Autoimmunity: Charged Residues of a Single MHC Binding Pocket Confer Selective Presentation of Self-Peptides in Pemphigus Vulgaris 1995, PNAS, 92:11935). The use of myelin proteolipid associated peptide epitope, a polymer or derivative of this epitope for MS has been further contemplated (Hammer et al., supra 1997, Adv. Immunol., 66:67).

[0015] In other approaches, peptides that are unique to the T cell antigen receptor molecule have been contemplated for a psoriasis vaccine such as IR 502 while others have been contemplated for Rheumatoid Arthritis. These peptides are found in a particular part of the variable region usually the third hyper-variable region of the beta chain of the T cell antigen Receptor (TCRαVX) (Kotzin et al., Preferential T-Cell Receptor β-Chain Variable Gene Use in Myelin Basic Protein-Reactive T-Cell Clones from Patients with Multiple Sclerosis 1991, Proc Nat Acad Ssi US, 88:9161; Oksenberg, et al., Limited heterogeneity of rearranged T-cell receptor V alpha transcripts in brains of multiple sclerosis patients. 1990, Nature, 345:344). For example, in an immune response to TCRαV3 (Sutherland et al., supra 1999, J. Immunol., 162:4720) a peptide is generated whose objective is to eliminate particular T cells, and by removing the T cells responsible for the condition, treat the underlying condition. However, this approach has the disadvantageous potential of eliminating other T cells that contain the same αV3 peptide sequence besides the one responsible for the autoimmune condition.

[0016] Still another peptide approach uses complimentary peptide vaccine that induces T cell anergy and prevents EAE in rats by induction of anti-TCR antibodies (a la anti-idiotype) and thereby elimination of these cells (Araga et al., supra 1999, J. Immunol., 163:476).

[0017] For some diseases the appearance of such modified self antigens is part of the disease process, the approach may be completely different. For example in Alzheimer's Dementia (AD), the normally cleared amyloid beta (Aβ) protein fragments are deposited in AD plaques wherein the desired response is to slow down, arrest or even reverse deposition and the subsequent pathological effects.

[0018] To accomplish this therapeutic approach, two basic immunological approaches have been evaluated requiring the use of so called “active” and/or “passive” agents.

[0019] Generally, “passive agents” as known in the art are composed of Mabs targeting cytokines, or cell surface marker, or soluble receptor with similar binding specificity. However, a problem encountered with “passive agents” is that they must be frequently administered parenterally for the life of the patient. Moreover, the Mabs or soluble receptor must be “humanized” (huMab) to allow long term administration and to avoid potential long term adverse effects. Hence, the production and sale of Mabs comprises one of the largest markets for treating chronic long-term conditions in the developed world.

[0020] For autoimmune uses, the use of agents for treatment ranges from insulin for type 1 diabetes to modern biotechnology treatments related to monoclonal antibodies and soluble receptors to complement cytokines and/or cell surface markers. Well known examples of modern biotechnology treatments include Remicade®, Enbrel® Humira® for rheumatoid arthritis, Amieve® and several interferon-β products for MS. Other examples of Mabs include materials used in clinical trials for psoriasis and MS. However, these products only act upon the major abnormal amounts of molecule such as TNF-α, complement, or cells with a particular surface marker and fail to treat the underlying condition.

[0021] For the treatment of AD, AD Mabs are being investigated as potential products by a number of private corporations. Notably, one known Aβ Mab investigated by Lilly is effective in decreasing Aβ burden in the cerebral cortex of “AD” mice. This finding confirms previous reports of beneficial effects of plaque reduction in “AD” transgenic mice by other known Ab both Mab and Pab investigated by Elan (Bard et al., Epitope and isotype specificities of antibodies to beta-amyloid peptide for protection against Alzheimer's disease-like neuropathology, Proc Natl Acad Sci U.S.A. 2003 Feb. 18; 100(4):2023-8; DeMattos et al. Peripheral anti-A beta antibody alters CNS and plasma A beta clearance and decreases brain A beta burden in a mouse model of Alzheimer's disease, Proc Natl Acad Sci U.S.A. 2001 July 17; 98(15):8850-5).

[0022] However, it should be noted that not all of the known Mab anti-Aβ being tested were shown to be effective (Bard et al. supra). Differences have been found in the ability of the respective antibodies to pass the Blood Brain Barrier (BBB). Clearly, the mechanism by which Aβ plaques are reduced is not understood.

[0023] For example, the necessity for inclusion of the Fc region was shown to be required in one compound entitled 3D3 which was found in the Central Nervous System (CNS) (Bard et al.). The Mab 3D3 was mediated by binding to phagocytes. It was shown by the art that 3D3 (IgG2b) and 10D5 (IgG1) were effective in reducing Aβ plaques but not 16C11 (IgG1) and 21F12 (IgG2a). Both IgG2a and IgG2b subclasses are considered as complement fixing antibodies that bind to Fc receptors. Furthermore, an association between Aβ plaque reduction and affinity of the Mabs was not validated. Further, Mab m266, is believed to act on CNS Aβ levels by serving as a sequestering agent acting from its plasma location given that it is not found in the CNS (DeMattos et al). It appears from the art that m266, 3D3 and 10D5 act by different mechanisms in plaque clearance wherein all three Mabs act as Aβ sinks in dialysis assays.

[0024] With regard to “active agents” in the treatment of Aβ, the objective is to induce the body to produce molecules to counteract or neutralize the agent. Hence, “active agents” can be considered vaccines that induce a long lived adaptative immune response in patients through induction of antibodies and/or by Cytotoxic Lymphocytes (CTL) or other cellular mechanisms to clear or impede the deposition of Aβ. Several reports have shown induction of immune responses having effects on plaque formation in murine AD models (Schenk et al. 1999 Immunization with amyloid-beta attenuates Alzheimer-disease-like pathology in the PDAPP mouse Nature 400: 173, Sigurdsson et al. 2001 Immunization with a nontoxic/nonfibrillar amyloid-beta homologous peptide reduces Alzheimer's disease-associated pathology in transgenic mice Am J Pathol 159:439).

[0025] The role of antibodies has been implicated in both the “passive” and the “active” immunization approach. However, the role of CTL or other cellular responses is less certain. For example, antibody alone may be sufficient for plaque clearance (Schenk et al., supra).

[0026] In spite of the state of the art with respect to recombinant proteins and their use as therapeutics, only one recombinant protein based vaccine is available as an approved successful vaccine, for Hepatitis B surface protein (HBsAg) however several sources are available including vaccines from Merck, GSK, Sanofi. Recombinant proteins for HSV, several other viruses, Chylamdia, Lyme disease have all not been commercially successful or failed to meet approvable criteria and workers using them are now looking for enhancers such as cytokines, new adjuvants etc.

[0027] Major problems are also associated with viral vector vaccines. The primary problem is the high immune response induced against the vector itself. This induced immune response severely limits the number and frequency of subsequent injections/boosters that can be administered. Moreover, some adenoviruses have the potential for causing allergic conditions such as celiac disease. It is also known that many viral proteins, including some from HIV and HSV contain immunosuppressive epitopes. Viral proteins are also suspected as causative agents for other autoimmune conditions such as type 1 diabetes, Multiple Sclerosis (MS), Myocarditis, and Graves disease.

[0028] Similarly, virus like particles (VLP) also suffer from the same disadvantages noted for viral vector vaccines whereby the particles incorporate antigenic epitope(s) of the plant, animal or bacterial virus (plasmid) where it is expressed in the VLP containing the foreign antigen of interest perhaps in a fusion protein along with the epitopes of the host virus or plasmid.

[0029] Another disadvantage of using a DNA-based vaccine for autoimmune conditions is the possibility of the vaccine DNA being integrated into the host's genome. One alternative is to conjugate a particular epitope to a carrier protein to avoid such incorporation into the genome. It is known within the art to use large carrier proteins such as Keyhole Limpet Hemocyanin (KLH), Bovine Serum Albumin (BSA), or Antigenics' heat shock proteins (HSP) coupled/conjugated or incorporated with a virus protein.

[0030] Other options for peptide delivery of peptide epitopes include the use of synthetic biodegradable microparticles like Poly (lactide-co-glycolide) PLG with aggregated antigen. Still other delivery technologies for peptide antigens include AutoVac™ of Pharmexa, Corixa's LEif™, Therion Biologic's or various other Virus Like Particle (VLP) technologies. Other small molecule delivery technologies for peptides are Antigen Express's ‘Ii-Key’ delivery, phage display and Multiple Antigen Presentation (MAPS) technologies (Rosenthal 2005 Immune peptide enhancement of peptide based vaccines Frontiers in Bioscience 1:478-482).

[0031] But again, all the known approaches have the major disadvantage of using large, very immunogenic particles. Moreover, patient populations requiring such therapeutics have usually been exposed to many of these same antigens during their lifetimes. Hence, and similar to vaccine vector delivery of antigens, clearance of the antigen can be so vigorous in the previously exposed host that no response will occur to the new antigen. On the other hand, a strong immune response may occur upon reintroduction of the vector. For example, in the case of the conjugate VP22 containing HSV-1 protein, the response may be undesirable given that a majority of adults have had one or more exposures to HSV-1 (Muran-yiova et al. 1991 Immunoprecipitation of herpes simplex virus polypeptides with human sera is related to their ELISA titre. Acta Virol. 35:252-9).

[0032] Hence, it is critical that the therapeutic be a small peptide used as a potential antigen as in Epimmune's Padre™ or CEL-SCI's Ligand Epitope Antigen Presenting System (L.E.A.P.S.™) technology as described in U.S. Pat. No. 5,652,342, the contents of which are incorporated herein by reference.

[0033] L.E.A.P.S. uses small peptides referred to as T cell Binding Ligands (TCBL's) as a peptide antigen delivery technology wherein the TCBL's are peptide sequences derived from the human immune system molecules known or suspected to bind to human T cells. Although L.E.A.P.S. includes a first peptide which is an antigenic peptide associated with disease or the causative organism of disease covalently bonded to a second peptide which is a T cell binding ligand, the hetero-functional cellular immunological reagents taught by U.S. Pat. No. 5,652,342 are not antigen (disease) specific in certain cases. Instead, U.S. Pat. No. 5,652,342 teaches T cell binding ligands including portions of MHC Classes I and II or accessory molecules such as 0-2-microglobulin, portions of LFA-3, portions of the Fc region of the heavy chain of immunoglobulins, and Ia⁺ molecules and generally teaches for the antigens associated with auto-immunity such as IDDM, RA and Thyroiditis. U.S. Pat. No. 5,652,342 fails to provide more antigen (disease) specific treatment.

[0034] Hence, there is a need for approaches to treating autoimmune diseases with immunotherapeutics requiring more specific and lower doses of active substance and less frequent dosing. The therapeutics should also allow for the option of subcutaneous, oral intradermal, intranasal or transdermal administration wherein the active portion of the therapeutics should be comprised of substantially smaller molecules (3-5000 Da) that are more likely to be able to cross the BBB.

[0035] Moreover, the need extends to treatments that do not require monoclonal antibodies or receptor agonists to molecules that are critical to maintaining normal body function such as TNF-α Soluble Receptor or those that require “humanization”.

[0036] There is further a need for therapeutics that does not eliminate essential or necessary T cells other than those responsible for the underlying disease. The therapeutics should only act upon the major abnormal molecule or cell while preventing or inducing a high response against the vector or delivery molecule.

[0037] There is further a need for a therapeutic that is not integrated into the host's genome wherein it may alter other normal or onco genes, their expression or activation.

[0038] There is still further a need for providing specific antigenic peptides associated with disease or the causative organism that can be linked with a T cell binding ligand such as L.E.A.P.S. Moreover, the therapeutics should be manufactured and be cost effective in its production and stable during storage before use.

### BRIEF SUMMARY OF THE INVENTION

[0039] The present invention provides peptide constructs useful for treatment of autoimmune disease such as multiple sclerosis, pemphigus vulgaris, or other conditions such as asthma, allergy, diabetes, and tissue transplantation rejection (including both host-versus-graft and graft-versus-host rejection), which differ from the above approaches used with antigenic peptide alone. The novel constructs bind in an antigen specific manner and redirect the T cell in the direction of a non-deleterious autoimmune response, primarily from a Th1 to a Th2 immune response, but where advantageous, primarily from a Th2 to a Th1 immune response. Alternatively, the novel constructs include one peptide component which will bind to T cells associated with autoimmune disease, asthma, allergies or host versus graft or graft versus host rejection while a second peptide component will bind to sites on the T cells which will preclude the normal sequence of events required for cell activation thereby initiating an abortative T cell modulation resulting in cell anergy and apoptosis.

[0040] Specifically, the novel peptides of this invention include peptide constructs of the following formula (I):
P₁-x-P₂ (I)
where P₁ is a peptide associated with autoimmune disease, allergy, asthma, host-versus-graft rejection, myocarditis, diabetes, tissue transplantation rejection or immune mediated disease and which will bind to an antigen receptor on a set or subset of T cells; P₂ is an immune response modifying peptide which will (i) cause a directed immune response by said set or subset of T cells to which the peptide P₁ is attached or (ii) bind to a T cell receptor which will cause said set or subset of T cells to which the peptide P₁ is attached to initiate, but not complete, an immune response causing said set or subset of T cells to undergo anergy and apoptosis; and x is a direct bond or linker for covalently bonding P₁ and P₂.

[0041] Alternatively, the invention contemplates a variable immunomodulatory peptide construct having the formula (II)
P₃-x-P₄

[0042] where P₃ is a peptide construct comprised of X₁ to X₁₄ said peptide P₃ being associated with autoimmune disease, allergy, asthma, host-versus-graft rejection, myocarditis, diabetes, and immune-mediated disease, which binds to an antigen receptor on a set or subset of T cells, and

[0043] P₄ is a peptide construct comprised of X₁ to X₁₄ causing a Tₕ2 directed immune response by said set or subset of T cells to which the peptide P₃ is attached or which binds to a T cell receptor causing said set or subset of T cells to which the peptide P₃ is attached to initiate, but not complete, an immune response causing said set or subset of T cells to undergo anergy and apoptosis;

[0044] such that X₁ to X₁₀ and X₁₄ describe a group of amino acids based on their features and X₁₁ to X₁₃ describe modifications to the peptide construct, wherein

[0045] X₁ is selected from the group consisting of Ala and Gly,

[0046] X₂ is selected from the group consisting of Asp and Glu,

[0047] X₃ is selected from the group consisting of Ile, Leu and Val,

[0048] X₄ is selected from the group consisting of Lys, Arg and His,

[0049] X₅ is selected from the group consisting of Cys and Ser,

[0050] X₆ is selected from the group consisting of Phe, Trp and Tyr,

[0051] X₇ is selected from the group consisting of Phe and Pro,

[0052] X₈ is selected from the group consisting of Met and Nle,

[0053] X₉ is selected from the group consisting of Asn and Gln,

[0054] X₁₀ is selected from the group consisting of Thr and Ser,

[0055] X₁₁ is Gaba^{χ} where X₂X₃, X₃X₂, X₂X₃, X₃X₂, X₃X₃, or X₂X₂ can be substituted with X₁₁;

[0056] X₁₂ is selected from the group consisting of acetyl, propionyl group, D glycine, D alanine and cyclohexylalanine;

[0057] X₁₃ is 5-aminopentanoic where any combination of 3 to 4 amino acids of X₂ and X₃ can be replaced with X₁₃;

[0058] X₁₄ is selected from the group consisting of X₁, X₂, X₃, X₄, X₅, X₆, X₇, X₈, X₉ and X₁₀; and

[0059] x is a direct bond or linker for covalently bonding P₃ and P₄;

[0060] The present invention also provides a first method for treating or preventing inappropriate autoimmune response in individuals at risk for autoimmune disease, allergic reactions, asthma or host-graft or graft-host rejection, wherein a pharmacologically effective amount of a peptide construct of formula (I) is administered to the individual to effectively eliminate the set or subset of T cells involved in the autoimmune response.

[0061] The present invention also provides a second method for modulating an inappropriate autoimmune response in individuals at risk for autoimmune disease, allergic reactions, asthma or host-graft or graft-host rejection, wherein a pharmacologically effective amount of a peptide construct of formula (I) is administered to the individual to redirect the autoimmune response from a Th1 to a Th2 immune response, or from a Th2 to a Th1 immune response, whereby the inappropriate autoimmune response is modulated to decrease or eliminate the adverse effects associated with the inappropriate autoimmune response.

### DETAILED DESCRIPTION OF THE INVENTION

[0062] It has been reported that the, failure of mature CD8 cells to simultaneously engage their TCR and CD8 co-receptor triggers an activation process that begins with inhibition of CD8 gene expression through remethylation and concludes with up-regulation of surface Fas and Fas ligand and cellular apoptosis (Pestano et al., Inactivation of Misselected CD8 T Cells by CD8 Gene Methylation and Cell Death 1999, Science, 284:1187). This is consistent with the results of others where if full engagement of certain very major coreceptors are not effected then an activation process, but abortative in nature, leading to apoptosis occurs (see also Gogolak et al., Collaboration of TCR-, CD4- and CD28-mediated signaling in antigen-specific MHC class II-restricted T-cells 1996, Immunol. Let. 54:135; Grakoui et al., The Immunological Synapse: A Molecular Machine Controlling T Cell Activation 1999, Science, 285:221; Malissen, Dancing the Immunological Two-Step 1999, Science, 285:207; Redpath et al., Cutting Edge: Trimolecular Interaction of TCR with MHC Class II and Bacterial Superantigen Shows a Similar Affinity to MHC:Peptide Ligands 1999, J. Immunol., 163:6; Preckel et al., supra 1998, Eur. J. Immunol., 28:3706; Sambhara et al., Programmed cell death of T cells signaled by the T cell receptor and the alpha 3 domain of class I MHC 1991, Science, 252:1424; Kishimoto et al., Strong TCR Ligation Without Costimulation Causes Rapid Onset of Fas-Dependent Apoptosis of Naive Murine CD4⁺ T Cells 1999, J. Immunol., 163:1817; Kubo et al., CD28 Costimulation Accelerates IL-4 Receptor Sensitivity and IL-4-Mediated Th2 Differentiation 1999, J. Immunol., 163:2432).

[0063] Therefore, a different approach would be to have a modulation but not with a full sequence of events, the construct binding in an antigen specific manner with the antigenic epitope but the TCBL ligand binding to a site on another molecule associated with certain early events that are early intermediates in the full expression pathway thereby occupying the space and causing an early event in the process of activation (such as Ca⁺⁺ flux, activation of various phosphatases, membrane migration events, such as “patching” or “capping”, changes in RNA metabolism) but not supporting the complete activation process which can be thought of as culminating in antigen specific antibody or non-antibody mediated specific Cytotoxic T Lymphocyte activity such as killing of infected or tumor cells, by acting on DNA synthesis, cell division, or cytokine secretion, namely, without allowing the ultimate tertiary complex of binding events (MHC, antigen TCR and CD4 (or CD8)) necessary for full activation by being out of the normal temporal sequence of events. Perhaps this early binding would be of such strength that it does not disassociate and allow the cell surface rearrangement necessary for the full and normal sequence of modulatory events, such as, proliferation or secretion of late cytokines such as Fas, TNF-α or IFN-γ and thereby prohibiting events found in an autoimmune disease associated pathway with complete T cell activation. For example, initially after antigen binding to the TCR ICAM-1 (also known as CD54) on APC binding to a T cell's LFA-1 (also known as CD11a/CD18) there is a shifting away and a rearrangement with clustering of the MHC and antigenic peptides on APC binding eventually by migration on T cell membrane to a clustering of TC and CD4 (or CD8) (Malissen supra 1999, Science, 285:207; Grakoui et al., supra 1999, Science, 285:221).

[0064] According to one embodiment of this invention, such rearrangement is prevented by the close association in a peptide construct using a TCBL from ICAM-1, LFA-3 (aa26-42), VLWKKQKDKVAELENSE (SEQ ID NO.4) (Osborn et al., Amino acid residues required for binding of lymphocyte function-associated antigen 3 (CD58) to its counter-receptor CD2 1995, JEM, 181:429), by either the disparity in the temporal binding or higher strength of binding activity, thereby preventing the rearrangements and other more intimate interactions necessary for activation. Initially these sites are close together but normally rearrangements on the T cell surface occur during the activation process so by preventing this shift activation should not occur. Likewise, a TCBL from CD4 that binds to the TCR and CD3 may be used as the TCBL in the peptide construct of this invention. Its binding to the T cell recognition site will inhibit subsequent events from occurring (MHC II with CD4 or β-2 with CD8).

[0065] Still another approach is a construct which redirects the immune response initiated by the natural autoimmune inducing event from a TH1 to a TH2 response (e.g., Lowrie et al., Therapy of tuberculosis in mice by DNA vaccination 1999, Nature, 400:269; Tisch et al., supra 1999, J. Immunol., 163:1178). As used herein, a TH2 directed response is one which directs the immune response toward the TH2 direction, thus favoring production of more cytokines IL-5, IL-4, IL-10, IL-13 TNF-a and antibody isotypes IgG1 and IgG3 in mice (or comparables in man) as opposed to Th1, where the immune response favors production of cytokines IFN-γ, IL-2, IL-6, IL-12 cytokines and antibody isotypes IgG2a and IgG2b in mice and Cytotoxic T cell activity. It is understood, of course, that a “TH2 directed response” is not intended to imply an exclusively TH2 response, but rather a mixed immune response which is weighted to favor a TH2 profile.

[0066] According to this embodiment a TCBL associated with TH2 responses; e.g., peptide G from MHC class II (Zimmerman et al., A new approach to T cell activation: natural and synthetic conjugates capable of activating T cells 1996, Vacc. Res., 5:91, 5:102; Rosenthal et al., 1999, Vaccine), IL-4 or IL-5 or peptides known to stimulate IL-4 or IL-5 synthesis are used as the TCBL along with the autoimmune inducing peptide (e.g., Hammer et al., supra, Krco et al., supra, Araga et al., supra, Ota et al., supra, Ruiz et al., supra, Yoon et al., supra, Dittel et al., Presentation of the Self Antigen Myelin Basic Protein by Dendritic Cells Leads to Experimental Autoimmune Encephalomyelitis 1999, J. Immunol., 163:32; Gautam et al., A Viral Peptide with Limited Homology to a Self Peptide Can Induce Clinical Signs of Experimental Autoimmune Encephalomyelitis 1998, J. Immunol., 161:60, the disclosures of which are incorporated herein by reference thereto) in the peptide conjugate. These peptide constructs may be used, for example, to treat type I diabetes. In an animal model the mechanism of diabetes prevention in the RIP-NP model was shown to be mediated by insulin 1-chain, and IL-4 producing regulatory cells acting as bystander suppressors (Homann et al., supra 1999, J. Immunol., 163:1833). Such redirection of immune responses have been previously reported by a DNA vaccine for TB which redirected the immune response from an inefficient response TH2 to a response that was a very effective Th1 (Lowrie et al., supra 1999, Nature, 400:269). Thus, redirecting an already existing immune response from a TH1 to a TH2 would be effective for treating autoimmune related diseases. A TCBL involved in CD28 costimulation (Kubo et al., supra) could also be effective for this purpose. If, on the other hand, the need was to redirect from a TH2 to a TH1, much less likely to be needed since many autoimmune conditions are thought to be the manifestation of deleterious TH1 effects, then a TCBL such as peptide J, DLLKNGERIEKVE (SEQ ID NO. 51) (Zimmerman et al., supra; Rosenthal et al., supra) or ones known to stimulate IL-2 or IL-12 synthesis would be used along with the autoimmune inducing peptide.

[0067] Yet another approach is to use the peptide construct to not activate the normal immune process but to activate the process leading to apoptosis of the T cell by using as the TCBL a ligand that binds to a site on the T cell whose normal binding and activation leads to apoptosis of the T cell; such as the TNF-receptor of the T cell, in which the TCBL would be the TNF-α ligand portion. Examples of such TNF peptides known to activate macrophages are amino acids 70-80 PSTHVLITHTI (SEQ ID NO. 5) (Britton et al., 1998, I & I, 66:2122) and perhaps the antagonist peptide represented by DFLPHYKNTSLGHRP (SEQ ID NO. 6) of another region (Chirinos-Rojas et al., A Peptidomimetic Antagonist of TNF-&-Mediated Cytotoxicity Identified from a Phage-Displayed Random Peptide Library 1998, J. Immunol., 161:5621). It has been suggested in WO 99/36903A1 that the H4-1-BB ligand is useful as a treatment for autoimmune disease similar to uses for flt3-L and CD40L; therefore, H4-1BB may also be used as TCBL for inclusion with autoimmune antigens to form the inventive peptide construct. Other such TCBL examples are available from application with Fas and Fas-ligand including the noncleavable Fas-ligand (WO 99/36079A1).

[0068] Since autoimmune reactive cells in disease are most likely already activated and may be expressing Fas (Tomita et al., Tetrapeptide DEVD-aldehyde or YVAD-chloromethylketone inhibits Fas/Apo-1(CD95)-mediated apoptosis in renal-cell-cancer cells 1996, Int. J. Can., 68:132; Lie et al., Synthesis and biological activity of four kinds of reversed peptides 1996, Biol. Pharma. Bul. 19:1602) the Fas-Ligand or the sequence obtained by reverse engineering technique to determine amino acid (aa) sequence acting as receptor for DEVD-aldehyde or YVAD (SEQ ID NO. 22) chloromethylketone, may also be used as the TCBL. Representatives from another pair, IFN-γ and the IFN-γ ligand can also be used as TCBL's in the invention peptide constructs.

[0069] In this invention the antigenic peptide and the peptide for T cell binding (TCBL) may be directly linked together in any order (i.e., N-terminal of one to C-terminal of other or vice versa) or the peptide may be covalently bonded by a spacer or linker molecule. With regard to linkers between the two domains, suitable examples include a thioether bond between an amino terminus bromoacetylated peptide and a carboxyl terminus cysteine, often preceded by a diglycine sequence (Zimmerman et al., supra), carbodiimide linkages, a multiple glycine, e.g., from 3 to 6 glycines, such as triglycine, with or without one or two serines, separation between the two entities, e.g., GGGS (SEQ ID NO.7), GGGSS (SEQ ID NO. 8), GGGGS (SEQ ID NO.9), GGGGSS (SEQ ID NO. 10), GGGSGGGS (SEQ ID NO.11), etc., and other conventional linkages, such as, for example, the direct linkages such as, EDS, SPDP, and MBS, as disclosed in the aforementioned U.S. Pat. No. 5,652,342.

[0070] Thus, the peptide constructs of this invention may be conveniently represented by the following formula (I):
P₁-x-P₂ (I)

[0071] where P₁ is a peptide associated with autoimmune disease, allergy or asthma, or transplantation rejection and which will bind to an antigen receptor on a set or subset of T cells;

[0072] P₂ is an immune response modifying peptide which will bind to T cells to cause a directed immune response by said set or subset of T cells to which the peptide P₁ is attached or which will bind to a T cell receptor which will cause said set or subset of T cells to which the peptide P₁ is attached to initiate, but not complete, an immune response causing said set or subset of T cells to undergo anergy and apoptosis; and x is a direct bond or linker for covalently bonding P₁ and P₂.

[0073] The TCBL portion of the immunomodulatory peptide construct of this invention, i.e., P₂, may comprise a discontinuous epitope composed of two small regions separated by a loop or by a single chain short peptide in place of the loop (Shan et al., Characterization of scFv-Ig Constructs Generated from the Anti-CD20 mAb 1F5 Using Linker Peptides of Varying Lengths 1999, J. Immunol., 162:6589). For example, an eight amino acid group, LRGGGGSS (SEQ ID NO.12), of 11.2 Angstroms in length (Reineke et al., A synthetic mimic of a discontinuous binding site on interleukin-10 1999, Nature Biotechnology, 17:271) has been used to form a single peptide from two smaller discontinuous peptides of IL-10, thereby forming a TCBL which could be used for redirection from a TH1 to a TH2, in combination with, for example, the IDDM, PV or MS inducing epitopes (Hammer et al., supra Tisch et al., supra).

[0074] Linkers (X) of varying lengths to form a single chain may be used, for example, GGGS (SEQ ID NO. 7), GGGGS (SEQ ID NO. 9), including, from among 1 or more repeats of this tetrapeptide or pentapeptide, e.g., GGGSGGGS (SEQ ID NO. 11), GGGSGTGSGSGS (SEQ ID NO. 52). Such linkers may result in a tertiary structure which might be of use to form a more avid TCBL (Shan et al., supra).

[0075] Although not strictly limited, the peptide constructs of this invention may have as many as about 200 amino acids in its sequence, preferably up to about 150 amino acids, and especially, up to about 100 amino acids. The minimum number of amino acids is also not strictly limited but usually each of the peptide components P₁ and P₂ will have at least about 4, preferably at least about 6, and more preferably at least about 8 or 9 amino acids in order to provide the appropriate epitope configuration for effectively binding to the appropriate site on the T cells of interest. Thus, the peptide constructs of this invention will usually contain from about 20 to about 100 or more amino acids.

[0076] The peptide constructs may be prepared using conventional solid state peptide synthesis, provided however, that for constructs having more than about 40 amino acids, especially more than about 50 amino acids, it is usually convenient and preferred to prepare shorter segments and then link the shorter segments using well known techniques in solid phase peptide synthesis.

[0077] The peptide constructs may be prepared using conventional solution phase condensation chemistry of smaller peptides prepared by solid phase peptide synthesis, provided however, that for constructs having more than about 40 amino acids, especially more than about 50 amino acids, it is usually convenient and preferred to prepare shorter segments and then link the shorter segments using well known techniques in solid phase peptide synthesis.

[0078] Alternatively, the peptide constructs of this invention may be prepared using well known genetic engineering methods. Further details on methods for producing the instant peptide constructs can be found in the aforementioned U.S. Pat. No. 5,652,342.

[0079] Improved versions of the peptide constructs are comprised of variables X₁ to X₁₂ substitutions where each of X₁ to X₁₂ describe a group of particular types of amino acids based on their features. For example, it is known that amino acids can be nonpolar, hydrophobic while another group of amino acids are polar, uncharged amino acids that are hydrophilic. Still further, it is known that amino acids can be grouped as those that are polar, charged, hydrophilic amino acids further subdivided between acidic and basic amino acids. Table 1 describes the chemical and structural features along with the corresponding amino acids.

TABLE 1

| Chemical or Structural Feature | Amino Acid |
|---|---|
| Polar/hydrophilic | N, Q, S, T, K, R, H, D, E, (C, Y)* |
| Non-polar/hydrophobic | (G), A, V, L, I, P, Y, F, W, M, C |
| H-bonding | C, W, N, Q, S, T, Y, K, R, H, D, E |
| Sulfur containing | C, M |
| Charged at Neutral | D, E, (C) |
| pH Negative/acidic | |
| Charged at Neutral | K, R, (H) |
| pH Positive/basic | |
| Ionizable | D, E, H, C, Y, K, R |
| Aromatic | F, W, Y, (H, no UV absorption) |
| Aliphatic | G, A, V, L, I, P |
| Forms covalent cross- | C |
| link (disulfide bond) | |
| Cyclic | P |

*Note:
Amino acids in parentheses have the indicated character to a limited extent.

[0080] Table 2 describes the amino acids for X₁ to X₁₀ wherein the amino acids for X₁ to X₁₀ have been selected on their common chemical and structural features as shown in Table 1 with PRT/1 code for inclusion in the improved variants of the invention. Instances of X₂X₃ or X₃X₂ or X₂X₃ or X₃X₂ or X₃X₃ or X₂X₂ can be replaced by X₁₁ or by gamma amino butyric acid (GABA) wherein the common feature is that the amino function is on the γ-carbon and not the α-carbon. Modifications for increased stability at the amino terminus by use of an acetyl or propionyl group, D glycine or D alanine or use of cyclohexylalanine at the amino terminus to reduce proteolysis are contemplated by the substitution of X₁₂. As shown in the improved variants of the sequence, X₁₂ can be present or not present on the sequence. It is noted that the sequences in computer readable form do not include X₁₂. However, the presence of the modification is present for all sequences where disclosed in the instant specification. Similarly, modifications by use of 5-aminopentanoic acid for replacement of lengths of 3 or 4 amino acids of X₂ and X₃ are also contemplated by the invention and represented as X₁₃ wherein the lengths of 3 or 4 amino acids of X₂ and X₃ can be replaced by 5-aminopentanoic acid. Although X₁₃ is not an amino acid, it is used as a place holder in some SEQ ID NO.'s to indicate 5-aminopentanoic acid bonded to the adjacent or underlying amino acid for improved stability. X₁₄ is a variable selected from any of X₁, X₂, X₃, X₄, X₅, X₆, X₇, X₈, X₉, or X₁₀.

TABLE 2

| Variable | Amino Acid | Chemical or Structural Feature |
|---|---|---|
| X₁ | A and G | Aliphatic, non polar |
| X₂ | D and E for acidic | Polar acidic, H-bonding, Charged |
| | amino acids | at Neutral pH Negative, Ionizable |
| X₃ | I, L or V | Non-polar, branched, non-cyclic |
| | | alkyl hydrocarbon |
| X₄ | K, R or H for basic | Polar basic/hydrophilic, H- |
| | amino acids | bonding, Ionizable |
| X₅ | C or S | Polar charged with similar |
| | | features as described in U.S. |
| | | Pat. No. 5,019,384 |
| X₆ | F, W or Y for | Non-polar/hydrophobic, |
| | aromatic amino acids | Aromatic |
| X₇ | F or P | Non-polar/hydrophobic, Ring |
| | | Structure* |
| X₈ | M or Nle | Natural and non-natural branched |
| | (Norleucine)^{ψ} | chain |
| X₉ | N or Q for amidated | Polar/hydrophilic, H-bonding, |
| | amino acids | Equivalent sized, acid carboxylic |
| | | acid group |
| X₁₀ | T or S | Polar/hydrophilic, H-bonding, |
| | | Capable of binding non-amino |
| | | acid molecules to protein |
| X₁₁ | Gaba^{χ} for X₂ X₃ | Amino function is on γ carbon |
| | or X₃ X₂ or X₂ X₃ or | and not α carbon |
| | X₃ X₂ or X₃ X₃ or | |
| | X₂ X₂ | |
| X₁₂ | Acetyl or propionyl | Improved stability |
| | group, D glycine or | |
| | D alanine, | |
| | Cyclohexylalanine at | |
| | amino terminus | |
| X₁₃ | 5-aminopentanoic acid | Improved Stability |
| | for replacement of 3 | |
| | or 4 amino acids of | |
| | X₂ and X₃ | |
| X₁₄ | X₁, X₂, X₃, X₄, | |
| | X₅, X₆, X₇, X₈, | |
| | X₉, or X₁₀ | |

*W is not added because W is less stable than F or P as described in U.S. Pat. No. 5,109,384
^{ψ}isomeric to leucine and isoleucine but not found in proteins and formed in the deamination of lysine. Also called caprine.
^{χ}Gamma amino butyric acid

[0081] The novel peptide constructs of this invention can also be used to treat transplant recipients, for example, for heart, liver, lung and kidney, who are either undergoing or at risk for rejection of the transplant (Host versus Graft or HvG). In this case, the peptide antigen(s) used to make the construct would be the major epitope(s) of the graft combined with a TCBL as described above to either suppress or redirect the immune response. As one of the major sources of antigenic materials causing the HvG are thought to be the MHC proteins and, in particular, the polymorphic regions that are from the graft tissue and recognized by the host's MHC, peptides from those regions of the graft's MHC molecules would be likely candidates for the antigenic epitope portion. Other regions of potential usefulness include polymorphic regions of the minor histocompatability antigens. TCBL's can be selected from, but are not restricted to the following LFA-3 or FasL described above (Lie et al., or Tomita et al., supra). Peptide G (SEQ ID NO. 15) from the MHC II molecule, or Hu IL-10 (SEQ ID NO.28) (Gesser et al., Identification of functional domains on human interleukin 10 1997, Proc. Nat. Acad. Sci. 94:14620; Lie et al., supra and Tomita et al., supra) may be selected for redirection of immune responses.

[0082] As activated T cells normally express MHC molecules, another way of immunomodulation is to take advantage of the programmed pathway established by antigen addition. T cells which receive a signal from the TCR and the MHC I to CD-8⁺ cells undergo apoptosis without other costimulatory signals (Sambhara et al., supra 1991, Science, 252:1424). Therefore, the TCBL, peptide E, (the α3 domain amino acids 223-229 of the human MHC I conserved region can be used along with the autoimmune epitope to form a peptide construct according to another embodiment of this invention.

[0083] The peptide constructs of this invention may be used as or in vaccines as therapeutic agents for treatment of autoimmune disease or HvG. The vaccines will be administered often but not always with an adjuvant and on a regular regimen such as weekly, biweekly, monthly, quarterly, semi-annually or annually by one of the following routes, ID, IM or Sub-cu and perhaps also as a cutaneous transdermal or nasal delivery vehicle in amounts of from 1-100, usually 10-50, micrograms per kilogram of body weight.

[0084] If a binding site is known on the target T cell with a defined amino acid sequence and the TCBL amino acid sequence on the ligand is not known then determination of the DNA encoding for the peptide would allow for determination of the cDNA and thus the complementary peptide sequence using the technique of Lie et al., supra, for example. In general, the TCBL's (P₂) used to form the peptide constructs of this invention will be selected from those for normal induction and modulation of immune responses, including those selected to effect redirection from Th1 or Th2, including, for example, those that are known to be related and involved in the normal events of activation, namely, IL-2, IL-10, IL-12, IL-4, IL-1β 163-171 (VQGEESNDK (SEQ ID NO.13)) (e.g., Bajpai et al., Immunomodulating activity of analogs of noninflammatory fragment 163-171 of human interleukin-1beta 1998 Immunopharmacology, 38:237; Beckers et al., Increasing the immunogenicity of protein antigens through the genetic insertion of VQGEESNDK sequence of human IL-1 beta into their sequence 1993, J. Immunol., 151:1757; Fresca et al., In vivo restoration of T cell functions by human IL-1 beta or its 163-171 nonapeptide in immunodepressed mice 1988, J. Immunol., 141:2651; Antoni, et al., A short synthetic peptide fragment of human interleukin 1 with immunostimulatory but not inflammatory activity 1986, J. Immunol, 137:3201) and most likely derived from the final complexes (MHC-I or II and CD8 or CD4) TCR and antigenic peptide. Examples of TCBL's that are associated with earlier activation events, include for example, Fas and FasL, TNF-α and TNF-αR and those for formation of early intermediate complexes and LFA-3 and CD2.

[0085] Examples of antigens associated with autoimmune disease, allergy, asthma, and transplantation rejection, include, for example, those mentioned above, including the background discussion and those shown in the following, non-limiting, representative examples, as well as in the literature references cited herein, the disclosures of which are incorporated herein, in their entirety, by reference thereto. Additional examples, may also be found in the following literature (de Lalla et al., Cutting Edge: Identification of Novel T Cell Epitopes in Lol p5a by Computational Prediction 1999, J. Immunol., 163:1725 (Lol p5a allergen from rye grass); Gautam et al., supra 1998, J. Immunol., 161:60); as well as many others available to one of ordinary skill in the art.

[0086] In one aspect, the invention provides methods of preventing or treating a disease characterized by amyloid deposition in a patient. Such methods entail inducing an immune response against a peptide component of an amyloid deposit in the patient. Such induction can be active by administration of an immunogen or passive by administration of an antibody or an active fragment or derivative of the antibody conjugated to the TCBL epitopes contemplated by the present invention.

[0087] In some patients, the amyloid deposit is aggregated Aβ peptide and the disease is Alzheimer's disease or some other autoimmune disease. In some methods, the patient is asymptomatic. In some methods, the patient is under 50 years of age. In some methods, the patient has inherited risk factors indicating susceptibility to Alzheimer's disease. Such risk factors include variant alleles in presenilin gene PS1 or PS2 and variant forms of APP. In other methods, the patient has no known risk factors for Alzheimer's disease.

[0088] For treatment of patients suffering from Alzheimer's disease, one treatment regime entails administering a dose of Aβ peptide conjugated to the TCBL epitopes contemplated by the present invention to the patient to induce the immune response. In some methods, the Aβ peptide conjugated to the TCBL epitopes contemplated by the present invention is administered with an adjuvant that enhances the immune response to the Aβ peptide. In some methods, the adjuvant is alum. In some methods, the adjuvant is MPL.

[0089] The therapeutic agent is typically administered orally, intranasally, intradermally, subcutaneously, intramuscularly, topically or intravenously. In some methods, the patient is monitored followed administration to assess the immune response. If the monitoring indicates a reduction of the immune response over time, the patient can be given one or more further doses of the agent.

[0090] In another aspect, the invention provides pharmaceutical compositions comprising Aβ conjugated to the TCBL epitope and an excipient suitable for oral and other routes of administration. The invention also provides pharmaceutical compositions comprising an agent effective to induce an immunogenic response against Aβ in a patient, and a pharmaceutically acceptable adjuvant. In some compositions, the adjuvant comprises an oil-in-water emulsion.

[0091] The invention further provides methods of preventing or treating Alzheimer's disease. In such methods, an effective dose of Aβ peptide is administered to a patient. The invention further provides for the use of Aβ, or an antibody thereto, in the manufacture of a medicament for prevention or treatment of Alzheimer's disease.

[0092] In another aspect, the invention provides methods of assessing efficacy of an Alzheimer's treatment method in a patient. In these methods, a baseline amount of antibody specific for Aβ peptide is determined in a tissue sample from the patient before treatment with an agent. An amount of antibody specific for Aβ peptide in the tissue sample from the patient after treatment with the agent is compared to the baseline amount of Aβ peptide-specific antibody. In others methods of assessing efficacy of an Alzheimer's treatment method in a patient, a baseline amount of antibody specific for Aβ peptide in a tissue sample from a patient before treatment with an agent is determined. An amount of antibody specific for Aβ peptide in the tissue sample from the subject after treatment with the agent is compared to the baseline amount of Aβ peptide-specific antibody. A reduction or lack of significant difference between the amounts of Aβ peptide-specific antibody or Aβ peptide measured after the treatment compared to the baseline amount indicates a negative treatment outcome.

[0093] In other methods of assessing efficacy of an Alzheimer's disease treatment method in a patient a control amount of antibody specific for Aβ peptide is determined in tissue samples from a control population. An amount of antibody specific for Aβ peptide in a tissue sample from the patient after administering an agent is compared to the control amount of Aβ peptide-specific antibody. An amount of Aβ peptide-specific antibody measured after the treatment that is significantly greater than the control amount of Aβ peptide-specific antibody indicates a positive treatment outcome.

[0094] The invention further provides diagnostic kits for performing the above methods. Such kits typically include a reagent that specifically binds to antibodies to Aβ or which stimulates proliferation of T-cells reactive with Aβ.

P1 from Alzheimer or Other Brain Related Epitopes

[0095] Antigen(s) such as Amyloid Precursor Protein (APP) and its presence have a potential role in plaques as well as in uses for diagnosis and treatment of Alzheimer's patients.

[0096] APP or an amino terminus peptide AD is known to have used a 40-42 amino acid protein or subcomponents thereof are the immunogen. However, there is a need for a delivery device because smaller peptides as Aβ₁₋₄₂ shown as SEQ ID NO. 53 are not very immunogenic.

(SEQ ID NO. 53)

DAEFRHDSGYEVHHQKLVFFAEDVGSNKGAIIGLMVGGVV

[0097] Variants of Aβ₁₋₄₂ are shown as SEQ ID NO. 54 but also are not very immunogenic.

(SEQ ID NO. 54)

X₂X₁X₂X₆X₄X₄X₂X₁₀X₁X₆X₂X₃X₄X₄X₉X₄X₃X₃X₆X₆X₁X₂X₂X₃
X₁X₅X₉X₄X₁X₁X₃X₃X₁X₃X₈X₃X₁X₁X₃X₃
or
X₁₂X₂X₁X₂X₆X₄X₄X₂X₁₀X₁X₆X₂X₃X₄X₄X₉X₄X₃X₃X₆X₆X₁X₂
X₂X₃X₁X₅X₉X₄X₁X₁X₃X₃X₁X₃X₈X₃X₁X₁X₃X₃
or
X₁₂X₂X₁X₂X₆X₄X₄X₂X₁₀X₁X₆X₁₁X₄X₄X₉X₄X₁₁X₆X₆X₁X₁₁X₁
X₅X₉X₄X₁X₁X₁₁X₁X₃X₈X₃X₁X₁X₁₁
or
X₁₂X₂X₁X₂X₆X₄X₄X₂X₁₀X₁X₆X₁₁X₄X₄X₉X₄X₁₁X₆X₆X₁X₁3X₁
X₅X₉X₄X₁X₁X₁₁X₁X₃X₈X₃X₁X₁X₁₁

[0098] If immunogenic improvements are needed because of suboptimal delivery of epitopes, one known method is to use the KLH conjugate of a 28 amino acid peptide of Aβ₁₋₂₈ (SEQ ID NO. 55) described in U.S. Pat. No. 4,666,829, the contents of which are incorporated herein by reference.

DAEFRHDSGYEVHHQKLVFFAENVGSNK (SEQ ID NO. 55)

[0099] Variants of SEQ ID NO. 58 of Aβ₁₋₂₈ are shown as SEQ ID NO. 56.

(SEQ ID NO. 56)

X₂X₁X₂X₆X₄X₄X₂X₁₀X₁X₆X₂X₃X₄X₄X₉X₄X₃X₃X₆X₆X₁X₂X₂X₃
X₁X₅X₉X₄
or
X₁₂X₂X₁X₂X₆X₄X₄X₂X₁₀X₁X₆X₂X₃X₄X₄X₉X₄X₃X₃X₆X₆X₁X₂X₂
X₃X₁X₅X₉X₄
or
X₁₂X₂X₁X₂X₆X₄X₄X₂X₁₀X₁X₆X₁₁X₄X₄X₉X₄X₁₁X₆X₆X₁X₁₁X₁
X₅X₉X₄
or
X₁₂X₂X₁X₂X₆X₄X₄X₂X₁₀X₁X₆X₁₁X₄X₄X₉X₄X₁₁X₆X₆X₁X₁3X₁
X₅X₉X₄

[0100] A shorter peptide than the 40-42 peptide of the 30 amino acid form of Aβ₁₋₃₀ polylysine (6 mer) shown as SEQ ID NO. 57 can be used (Sigurdsson et al., Immunization with a Nontoxic/Nonfibrillar Amyloid-β Homologous Peptide Reduces Alzheimer's Disease-Associated Pathology in Transgenic Mice 2001 Am J Pathol 159:439).

DAEFRHDSGYEVHHQKLVFFAENVGSNKAI (SEQ ID NO. 57)

[0101] The variants of Aβ₁₋₃₀ of SEQ ID NO. 63 are shown by the following SEQ ID NO. 58.

(SEQ ID NO. 58)

X₂X₁X₂X₆X₄X₄X₂X₁₀X₁X₆X₂X₃X₄X₄X₉X₄X₃X₃X₆X₆X₁X₂X₂X₃
X₁X₅X₉X₄X₁X₃
or
X₁₂X₁X₂X₆X₄X₄X₂X₁₀X₁X₆X₂X₃X₄X₄X₉X₄X₃X₃X₆X₆X₁X₂X₂X₃
X₁X₅X₉X₄X₁X₃
X₁₂X₂X₁X₂X₆X₄X₄X₂X₁₀X₁X₆X₁₁X₄X₄X₉X₄X₁₁X₆X₆X₁X₁₁X₁
X₅X₉X₄X₁X₃
or
X₁₂X₂X₁X₂X₆X₄X₄X₂X₁₀X₁X₆X₁₁X₄X₄X₉X₄X₁₁X₆X₆X₁X₁3X₁
X₅X₉X₄X₁X₃

[0102] Where the peptides contain two different epitopes, the first epitope is at the aa location 1-11 or Aβ₁₋₁₁ as shown by the SEQ ID NO. 59.

(SEQ ID NO. 59)

DAEFRHDSGYE

[0103] Variants of SEQ ID NO. 59 are shown by the following SEQ ID NO. 60.

(SEQ ID NO. 60)

X₂X₁X₂X₆X₄X₄X₂X₁₀X₁X₆X₂
or
X₁₂X₂X₁X₂X₆X₄X₄X₂X₁₀X₁X₆X₂

[0104] The second epitope for Aβ₂₂₋₂₈ is at location 22-28 and is shown as SEQ ID NO. ENVGSNK (SEQ ID NO. 61) and the variants thereof are shown as SEQ ID NO. 62.

(SEQ ID NO. 62)

X₂X₂X₃X₁X₅X₉X₄
or
X₁₂X₂X₂X₃X₁X₅X₉X₄
or
X₁₂X₁₁X₁₁X₁X₅X₉X₄
or
X₁₂X₁3X₁X₅X₉X₄

[0105] An immunoreactive effect can also be elicited by absorption removal of a much smaller portion of the first 12 amino acids Aβ₁₋₁₂ shown as SEQ ID NO. 63 (Lemere et al., Nasal Aβ Treatment Induces Anti-Aβ Antibody Production and Decreases Cerebral Amyloid Burden in PD-APP Mice 2000 Ann. N.Y. Acad. Sci. 920:328).

(SEQ ID NO. 63)

DAEFRHDSGYEV

[0106] The variants of Aβ₁₋₁₂ are shown as SEQ ID NO. 64.

(SEQ ID NO. 64)

X₂X₁X₂X₆X₄X₄X₂X₁₀X₁X₆X₂X₃
or
X₁₂X₂X₁X₂X₆X₄X₄X₂X₁₀X₁X₆X₂X₃
or
X₁₂X₂X₁X₂X₆X₄X₄X₂X₁₀X₁X₆X₁₁

[0107] The first 10 amino acids can further be limited to the antigenic site as Aβ₁₋₁₀ shown as SEQ ID NO. 65.

(SEQ ID NO. 65)

DAEFRHDSGY

[0108] Variants of Aβ₁₋₁₀ are shown as SEQ ID NO. 66.

(SEQ ID NO. 66)

X₂X₁X₂X₆X₄X₄X₂X₁₀X₁X₆
or
X₁₂X₂X₁X₂X₆X₄X₄X₂X₁₀X₁X₆

[0109] Still further, a tetrapeptide of amino acids when incorporated into a phage epitope delivery system can be used to induce anti-aggregation activity antibodies for Aβ₃₋₆ as shown in SEQ ID NO. 67

(SEQ ID NO. 67)

EFRH

[0110] The variants of Aβ₃₋₆ are shown as SEQ ID NO. 68.

(SEQ ID NO. 68)

X₂X₇X₄X₄
or
X₁₂X₂X₇X₄X₄

[0111] However, known methods compositions contemplate other regions of amyloid peptides. For example, WO9748792A1 teaches amyloid peptides for a transgenic mouse model. Similarly, WO 98/03644A1 and U.S. Pat. No. 5,811,633 teach Alzheimer protein gene transgenic models. Moreover, immunological approaches for treating AD including peptides and delivery technologies including the VLP technology and tetrameric peptide Aβ₃₋₆ are known (Frenkel et al., 2001 Generation of auto-antibodies towards Alzheimer's disease vaccination, Vaccine 19:2615).

[0112] In particular, U.S. Pat. No. 4,666,829 teaches Aβ peptides including 1-28 and conjugation to KLH for induction of immune responses. Delivery devices are also known for peptides. L.E.A.P.S. technology for peptide delivery devices include uses to replace among other molecules KLH. Moreover, U.S. Pat. No. 5,652,342 and U.S. Pat. No. 6,096,315, the contents of which are incorporated herein by reference, teach examples and sequences for Central Nervous System (CNS) diseases such as MS and diseases caused by prions such as Creutzfeldt-Jakob disease (CJD) and Mad cow disease including Alzheimer's dementia. These sequences are contemplated by the invention and can be linked to any of the TCBL's described herein.

P1 for Dilated Cardiac Myopathy (DCM) or Experimental Autoimmune Myocarditis (EAM)

[0113] The P1 epitope can be selected from cardiac proteins such as those found reactogenic in Dilated Cardiac Myopathy (DCM) or Experimental Autoimmune Myocarditis (EAM) (Donermeyer et al., Myocarditis-inducing epitope of myosin binds constitutively and stably to I-Ak on antigen-presenting cells in the heart, J Exp Med 1995; 182:1291-1300; Bachmaier et al. 1999 “Generation of humanized mice susceptible to peptide induced inflammatory heart disease” Circulation 99:1885; Taylor et al., A spontaneous model for autoimmune myocarditis using the human MHC molecule HLA-DQ8. J Immunol. 2004 Feb. 15; 172(4):2651-8; Nishimura et al., “Autoimmune dilated cardiomyopathy in PD-1 receptor-deficient mice, Science, 2001 Jan. 12; 291(5502):319-22; Okazaki et al., “Autoantibodies against cardiac troponin I are responsible for dilated cardiomyopathy in PD-1-deficient mice”, Nat Med. 2003 December; 9(12):1477-83). A/J Mice Experimental Autoimmune Myocarditis (EAM) can be induced by infection with coxsackie virus B3 or by immunization with murine or porcine cardiac myosin or a cardiogenic peptide derived from the murine cardiac myosin. The My-1₃₃₄₋₃₅₂ is shown by the following SEQ ID NO. 16.

(SEQ ID NO. 16)

DSAFDVLSFTAEEKAGVYK

[0114] The improved variants of My-1₃₃₄₋₃₅₂ can be shown by the following SEQ ID NO. 69.

(SEQ ID NO. 69)

X₂X₅X₁X₆X₂X₃X₃X₅X₆X₁₀X₁X₂X₂X₄X₁X₁X₃X₆X₄
or
X₁₂X₂X₅X₁X₆X₂X₃X₃X₅X₆X₁₀X₁X₂X₂X₄X₁X₁X₃X₆X₄
or
X₁₂X₂X₅X₁X₆X₁₁X₅X₆X₁₀X₁X₁₁X₄X₁X₁X₃X₆X₄
or
X₁₂X₂X₅X₁X₆X₁3X₅X₆X₁₀X₁X₁₁X₄X₁X₁X₃X₆X₄

[0115] Another peptide that can be used from murine cardiac myosin is mM7α shown as SEQ ID NO. 70.

(SEQ ID NO. 70)

SLKLMATLFSTYAS

[0116] A variant for mM7α is shown as SEQ ID NO. 71.

(SEQ ID NO. 71)

X₅X₃X₄X₃X₈X₁X₁₀X₃X₇X₅X₁₀X₆X₁X₅

[0117] The corresponding human peptide hM7α is shown as SEQ ID NO. 72.

(SEQ ID NO. 72)

SLKLMATLFSSYAT

[0118] The variants of hM7α are shown as SEQ ID NO. 73.

(SEQ ID NO. 73)

X₅X₃X₄X₃X₈X₁X₁₀X₃X₇X₅X₅X₆X₁X₁₀
or
X₁₂X₅X₃X₄X₃X₈X₁X₁₀X₃X₇X₅X₅X₆X₁X₁₀

[0119] SEQ ID NO.'s 16 and 69-73 cause Experimental Autoimmune Myocarditis (EAM) in a line of double transgenic mice negative for both murine CD4 and CD8 containing human CD4 and DQ6 in the C57BL6 strain (Bachmaier et al. supra). Similarly, mM7α causes EAM in BALB/c but not the C57BL6, or the single transgenic hCD4 in a mCD4, mCD8 double knockout (Id.). Human DQ6 has been implicated in myocarditis in man (Limas et al., “Possible involvement of the HLA-DQB1 gene in susceptibility and resistance to human dilated cardiomyopathy”, Am Heart J. 1995 June; 129(6):1141-4).

[0120] Other human epitopes of myosin associated with induction of myocarditis in rats are encompassed by SEQ ID NO.'s 16 and 69-73. Still others are found in the S2 region (Li et al., Cryptic Epitope Identified in Rat and Human Cardiac Myosin S2 R Induces Myocarditis in the Lewis Rat, J Immunol. 2004. 172:3225-3234) and include S2-16, the sequence being shown by SEQ ID NO. 769.

(SEQ ID NO. 769)

KRKLEGDLKLTQESIMDLENDKQQL

[0121] The improved variants of the S2 region are shown as SEQ ID NO. 770.

(SEQ ID NO. 770)

X₄X₄X₄X₃X₂X₁X₂X₃X₄X₃X₁₀X₉X₃X₁₀X₃X₈X₂X₃X₂X₉X₂X₄X₉X₉
X₃
or
X₁₂X₄X₄X₄X₃X₂X₁X₂X₃X₄X₃X₁₀X₉X₃X₁₀X₃X₈X₂X₃X₂X₉X₂X₄
X₉X₉X₃
or
X₄X₄X₄X₁₁X₁X₁₁X₄X₃X₁₀X₉X₃X₁₀X₃X₈X₁₁X₂X₉X₂X₄X₉X₉X₃
or
X₁₂X₄X₄X₄X₁₁X₁X₁₁X₄X₃X₁₀X₉X₃X₁₀X₃X₈X₁₁X₂X₉X₂X₄X₉X₉
X₃
or
X₄X₄X₄X₃X₂X₁X₂X₃X₄X₃X₁₀X₉X₃X₁₀X₃X₈X₁3X₉X₂X₄X₉X₉X₃
or
X₁₂X₄X₄X₄X₃X₂X₁X₂X₃X₄X₃X₁₀X₉X₃X₁₀X₃X₈X₁3X₉X₂X₄X₉X₉
X₃

[0122] It is also contemplated that antibodies identified in a patients sera could be evaluated with regard to epitope suitability in a L.E.A.P.S. conjugate for therapeutic application (Anderson et al., Molecular analysis of polyreactive monoclonal antibodies from rheumatic carditis: human anti-N-acetylglucosamine/anti-myosin antibody V region genes, J Immunol. 1998 Aug. 15; 161(4):2020-31).

[0123] The murine and human sequences for cardiac antigen troponin I are the same wherein both sequences (have been implicated in human disease) called cTnIξ, the sequence being shown by SEQ ID NO. 74.

(SEQ ID NO. 74)

NITEIADLTQK

[0124] The improved variants of cTnξ as shown by the SEQ ID NO. 75 are

(SEQ ID NO. 75)

X₉X₃X₁₀X₂X₃X₁X₂X₃X₁₀X₉X₄
or
X₁₂X₉X₃X₁₀X₂X₃X₁X₂X₃X₁₀X₉X₄
or
X₁₂X₉X₃X₁₀X₁₁X₁X₁₁X₁₀X₉X₄

[0125] It is also known that a knockout mouse line having the gene PD-1 for programmed cell death 1 being deleted develop Dilated Cardiomyopathy (DCM) with anti cardiac tropinin (cTnI) antibodies. Some of the antibodies are capable of recognizing a single peptide epitope and the monoclonal antibodies from cloned lines from these mice are capable of generating some of the EAM effects seen in the transgenic mice (Okazaki et al., supra). Other transgenic mice have been prepared using human genes implicated in myocarditis such as HLA DQ8 (Taylor et al., supra; Elliott et al., Autoimmune cardiomyopathy and heart block develop spontaneously in HLA-DQ8 transgenic IAbeta knockout NOD mice, Proc Natl Acad Sci USA 2003 Nov. 11, 100(23):13447-52). Transgenic mice have also been prepared using human cardiac protein genes such as myotrophin (Sarkar et al., “Cardiac over-expression of Myotrophin triggers myocardial hypertrophy and heart failure in transgenic mice”, JBC epub Feb. 16, 2004, J Biol Chem. 2004 Feb. 16).

[0126] Any of these sequences isolated from murine knockouts or isolated from the antibodies found therein are contemplated by the invention and can be linked to any of the TCBL's described herein.

[0127] Ansari et al. (1994 “Epitope mapping of the branched chain alpha-ketoacid dehydrogenase dihydrolipoyl transacylase (BCKD-E2) protein that reacts with sera from patients with idiopathic dilated cardiomyopathy”, J Immunol 153(10): 4754-65) identified the peptide BCKD-E2₁₁₆₋₁₃₄, the sequence being shown by SEQ ID NO. 771.

(SEQ ID NO. 771)

VRRLAMENNIKLSEVVGSG

[0128] The improved variants of BCKD-E2₁₁₆₋₁₃₄ are shown by SEQ ID NO. 772.

(SEQ ID NO. 772)

X₃X₄X₄X₃X₁X₈X₂X₉X₉X₃X₄X₃X₁₀X₂X₃X₃X₁X₁₀X₁
or
X₁₂X₃X₄X₄X₃X₁X₈X₂X₉X₉X₃X₄X₃X₁₀X₂X₃X₃X₁X₁₀X₁
or
X₃X₄X₄X₃X₁X₈X₂X₉X₉X₃X₄X₃X₁₀X₁₁X₃X₁X₁₀X₁
or
X₃X₄X₄X₃X₁X₈X₂X₉X₉X₃X₄X₃X₁₀X₁3X₁X₁₀X₁
or
X₁₂X₃X₄X₄X₃X₁X₈X₂X₉X₉X₃X₄X₃X₁₀X₁₁X₃X₁X₁₀X₁
or
X₁₂X₃X₄X₄X₃X₁X₈X₂X₉X₉X₃X₄X₃X₁₀X₁3X₁X₁₀X₁

[0129] Adderson et al. (1998. Molecular analysis of polyreactive monoclonal antibodies from rheumatic carditis: human anti-N-acetylglucosamine/anti-myosin antibody V region genes. J Immunol. 161:2020-31) identified the LMM1 peptide as follows as shown by SEQ ID NO. 773.

(SEQ ID NO. 773)

KEALISSLTRGKLTYTQQ

[0130] The improved variants of the LLM1 peptide are shown by SEQ ID NO. 774.

(SEQ ID NO. 774)

X₄X₂X₁X₃X₃X₁₀X₁₀X₃X₁₀X₄X₁X₄X₃X₁₀X₆X₁₀X₉X₉
or
X₁₂X₄X₂X₁X₃X₃X₁₀X₁₀X₃X₁₀X₄X₁X₄X₃X₁₀X₆X₁₀X₉X₉
or
X₄X₂X₁X₁₁X₁₀X₁₀X₃X₁₀X₄X₁X₄X₃X₁₀X₆X₁₀X₉X₉
or
X₁₂X₄X₂X₁X₁₁X₁₀X₁₀X₃X₁₀X₄X₁X₄X₃X₁₀X₆X₁₀X₉X₉

[0131] Adderson et al. also identified the LMM33 peptide as shown by SEQ ID NO. 775.

SERVQLLHSQNTSLINQK (SEQ ID NO. 775)

[0132] The improved variants the LMM33 peptide as shown by SEQ ID NO. 776.

(SEQ ID NO. 776)

X₁₀X₂X₄X₃X₉X₃X₃X₄X₁₀X₉X₉X₁₀X₁₀X₃X₃X₁₀X₁₀X₄
or
X₁₀X₂X₄X₃X₉X₃X₃X₄X₁₀X₉X₉X₁₀X₁₀X₃X₃X₁₀X₁₀X₄
or
X₁₂X₁₀X₂X₄X₃X₉X₃X₃X₄X₁₀X₉X₉X₁₀X₁₀X₃X₃X₁₀X₁₀X₄
or
X₁₂X₁₀X₂X₄X₃X₉X₁₁X₄X₁₀X₉X₉X₁₀X₁₀X₁₁X₁₀X₁₀X₄

P1 for Peptide Antigen for Insulin Dependent Diabetes Mellitus (IDDM)

[0133] It has been known in the art that an islet cell 65 kDa protein and peptides from bovine serum albumin (BSA), in particular one called ABBOS, an enzyme Glutamic Acid Decarboxylase (GAD65) found in pancreatic beta islet and other cells including brain, CVB4, Heat Shock Protein (HSP) and insulin, Bacterial Superantigens (BSA), CVB4 and rubella virus have been implicated as environmental factors causing Insulin Dependent Diabetes Mellitus (IDDM) in a susceptible host, perhaps by molecular mimicry and epitope spreading to encompass a natural epitope of GAD or HSP. The peptides that have been suggested as causative antigens of IDDM can be linked to the TCBL ligands described herein to form a therapeutic for the treatment of IDDM.

[0134] The abbreviation for the amino acid sequence is GAD65 wherein the sequence starting at position is 247 is described by SEQ ID NO. 76 (Wilson et al., Therapeutic Alteration of Insulin-Dependent Diabetes Mellitus Progression by T Cell Tolerance to Glutamic Acid Decarboxylase 65 Peptides In Vitro and In Vivo, 2001, J. Immunol., 167: 569, Tisch et al., supra 1999 JI 163:1178; Karlsson et al., Th1-like dominance in high-risk first-degree relatives of type I diabetic patients 2000, Diabetologia 43:742).

(SEQ ID NO. 76)

NMYAMMIARFKMFPEVKEKGMAALPRLIAFTSEHSHFSLK

[0135] The improved variants of the GAD65 starting at position is 247 are

(SEQ ID NO. 77)

X₉X₈X₆X₁X₈X₈X₃X₁X₄X₆X₄X₈X₆X₇X₂X₃X₄X₂X₄X₁X₈X₁X₁X₃X₇
X₄X₃X₃X₁X₆X₁₀X₅X₂X₄X₅X₄X₆X₅X₃X₄
or
X₁₂X₉X₈X₆X₁X₈X₈X₃X₁X₄X₆X₄X₈X₆X₇X₂X₃X₄X₂X₄X₁X₈X₁X₁
X₃X₇X₄X₃X₃X₁X₆X₁₀X₅X₂X₄X₅X₄X₆X₅X₃X₄
or
X₁₂X₉X₈X₆X₁X₈X₈X₃X₁X₄X₆X₄X₈X₆X₇X₁₁X₄X₂X₄X₁X₈X₁X₁X₃
X₇X₄X₁₁X₁X₆X₁₀X₅X₂X₄X₅X₄X₆X₅X₃X₄

[0136] Another GAD65 peptide starting at position 253 is shown by SEQ ID NO. 78.

(SEQ ID NO. 78)

IARFKMFPEVKEKGMAALPRLIAFTSEHSHFSLK

[0137] The improved variants of the GAD65 peptide starting at position 253 are shown by SEQ ID NO. 79.

(SEQ ID NO. 79)

X₃X₁X₄X₆X₄X₈X₆X₇X₂X₃X₄X₂X₄X₁X₈X₁X₁X₃X₇X₄X₃X₃X₁X₆
X₁₀X₅X₂X₄X₅X₄X₆X₅X₃X₄
or
X₁₂X₃X₁X₄X₆X₄X₈X₆X₇X₂X₃X₄X₂X₄X₁X₈X₁X₁X₃X₇X₄X₃X₃X₁
X₆X₁₀X₅X₂X₄X₅X₄X₆X₅X₃X₄
or
X₁₂X₃X₁X₄X₆X₄X₈X₆X₇X₂X₃X₄X₂X₄X₁X₈X₁X₁X₃X₇X₄X₁₁X₁X₆
X₁₀X₅X₂X₄X₅X₄X₆X₅X₃

[0138] The GAD65 starting at position 524 is shown by SEQ ID NO. 80 (Quinn et al., MHC Class I-Restricted Determinants on the Glutamic Acid Decarboxylase 65 Molecule Induce Spontaneous CTL Activity, 2001, J. Immunol., 167:1748, Herman A et al., Determination of Glutamic Acid Decarboxylase 65 Peptides Presented by the Type I Diabetes-Associated HLA-DQ8 Class II Molecule Identifies an Immunogenic Peptide Motif 1999 JI 163:6275; Winer et al., Peptide Dose, MHC Affinity, and Target Self-Antigen Expression Are Critical for Effective Immunotherapy of Nonobese Diabetic Mouse Prediabetes 2000 JI 165:4086).

SRLSKVAPVIKARMMEYGTT (SEQ ID NO. 80)

[0139] The improved variants of the GAD65 peptide starting at position 524 are shown by SEQ ID NO. 81.

(SEQ ID NO.81)

X₅X₄X₃X₅X₄X₃X₁X₇X₃X₃X₄X₁X₄X₈X₈X₂X₆X₁X₁₀X₁₀
or
X₁₂X₅X₄X₃X₅X₄X₃X₁X₇X₃X₃X₄X₁X₄X₈X₈X₂X₆X₁X₁₀X₁₀
or
X₁₂X₅X₄X₃X₅X₄X₃X₁X₇X₁₁X₄X₁X₄X₈X₈X₂X₆X₁X₁₀X₁₀

[0140] The GAD65 starting at position 506 is shown by SEQ ID NO. 82 (Wilson et al., supra Karlsson et al., supra).

(SEQ ID NO. NO. 82)

IPPSLRYLEDEERMSRLSK

[0141] The improved variants of the GAD65 peptide starting at position 506 are shown by SEQ ID NO. 83.

(SEQ ID NO. 83)

X₃X₇X₇X₅X₃X₄X₆X₂X₂X₂X₂X₄X₈X₅X₄X₃X₅X₄
or
X₁₂X₃X₇X₇X₅X₃X₄X₆X₂X₂X₂X₂X₄X₈X₅X₄X₃X₅X₄
or
X₁₂X₃X₇X₇X₅X₃X₄X₆X₁₁X₁₁X₄X₈X₅X₄X₃X₅X₄
or
X₁₂X₃X₇X₇X₅X₃X₄X₆X₁3X₄X₈X₅X₄X₃X₅X₄

[0142] The GAD65 starting at position 201 is shown by the SEQ ID NO. 84 (Quinn et al., supra JI 167:1748 2001, Herman A et al., supra 1999 JI 163:6275, Liu J, et al., Major DQ8-restricted T-cell epitopes for human GAD65 mapped using human CD4, DQA1*0301, DQB1*0302 transgenic IA (null) NOD mice Diabetes. 1999 March; 48(3):469-77).

(SEQ ID NO. 84)

NTNMFTYEIAPVFVLLEYVT

[0143] The improved variants of the GAD65 peptide starting at position 201 are shown by SEQ ID NO. 85.

(SEQ ID NO. 85)

X₉X₁₀X₉X₈X₆X₁₀X₆X₂X₃X₁X₇X₃X₆X₃X₃X₃X₂X₆X₃X₁₀
or
X₁₂X₉X₁₀X₉X₈X₆X₁₀X₆X₂X₃X₁X₇X₃X₆X₃X₃X₃X₂X₆X₃X₁₀
or
X₁₂X₉X₁₀X₉X₈X₆X₁₀X₆X₁₁X₁X₇X₃X₆X₁₁X₁₁X₆X₃X₁₀
or
X₁₂X₉X₁₀X₉X₈X₆X₁₀X₆X₁₁X₁X₇X₃X₆X₁3X₆X₃X₁₀

[0144] The peptide from Bovine Serum albumin called ABBOS at position 152 is shown by the SEQ ID NO. 86 (Winer et al., supra 2000 JI 165:4086, Karlsson et al., supra Diabetologia 43:742).

(SEQ ID NO. 86)

FKADEKKFWGKYLYE

[0145] The improved variants of ABBOS at position 152 are shown by SEQ ID NO. 87.

(SEQ ID NO. 87)

X₆X₄X₁X₂X₂X₄X₄X₆X₆X₁X₄X₆X₃X₆X₂
or
X₁₂X₆X₄X₁X₂X₂X₄X₄X₆X₆X₁X₄X₆X₃X₆X₂
or
X₁₂X₆X₄X₁X₁₁X₄X₄X₆X₆X₁X₄X₆X₃X₆X₂

[0146] The human Insulin β chain position starting at aa9 is shown by SEQ ID NO. 88 (Urbank-Ruiz et al., Immunization with DNA encoding an immunodominant peptide of insulin prevents diabetes in NOD mice, 2001, Clin Immunol 100 (2): 164-171, Abiru et al., Peptide and Major Histocompatibility Complex-Specific Breaking of Humoral Tolerance to Native Insulin With the B9-23 Peptide in Diabetes-Prone and Normal Mice Diabetes 50:1274 2001).

(SEQ ID NO. 88)

SHLVEALYLVCGERG

[0147] The improved variants human Insulin β chain position starting at aa9 are shown by SEQ ID NO. 89.

(SEQ ID NO. 89)

X₅X₄X₃X₃X₂X₁X₃X₆X₃X₅X₁X₂X₄X₁
or
X₁₂X₅X₄X₃X₃X₂X₁X₃X₆X₃X₅X₁X₂X₄X₁
or
X₁₂X₅X₄X₁₁X₁X₃X₆X₃X₅X₁X₂X₄X₁
or
X₁₂X₅X₄X₁₃X₁X₃X₆X₃X₅X₁X₂X₄X₁

[0148] The human heat shock protein HSP at position 277 is shown by SEQ ID NO. 90 (Elias et al., Induction of diabetes in standard mice by immunization with the p277 peptide of a 60-kDa heat shock protein, 1995, Eur J Immunol 25:2815).

(SEQ ID NO. 90)

VLGGGCALLRCIPALDSLTPANED

[0149] The improved variants of the human heat shock protein HSP at position 277 are shown by SEQ ID NO. 91.

(SEQ ID NO. 91)

X₃X₃X₁X₁X₁X₅X₁X₃X₃X₄X₅X₃X₇X₁X₃X₂X₅X₃X₁₀X₇X₁X₉X₂X₂
or
X₁₂X₃X₃X₁X₁X₁X₅X₁X₃X₃X₄X₅X₃X₇X₁X₃X₂X₅X₃X₁₀X₇X₁X₉
X₂X₂
or
X₁₂X₁₁X₁X₁X₁X₅X₁X₁₁X₄X₅X₃X₇X₁X₁₁X₅X₃X₁₀X₇X₁X₉X₁₁

[0150] The RVEp151 is shown by SEQ ID NO. 92 (Ou et al., Cross-reactive rubella virus and glutamic acid decarboxylase (65 and 67) protein determinants recognised by T cells of patients with type I diabetes mellitus, 2000, Diabetologia 43:750).

(SEQ ID NO. 92)

EACVTSWLWSGEGAVFYRVDLHFINLGT

[0151] The improved variants of RVEp151 are shown by SEQ ID NO. 93.

(SEQ ID NO. 93)

X₂X₁X₅X₃X₁₀X₅X₆X₃X₆X₅X₁X₂X₁X₁X₃X₆X₆X₄X₃X₂X₃X₄X₆X₃
X₉X₃X₁X₁₀
or
X₁₂X₂X₁X₅X₃X₁₀X₅X₆X₃X₆X₅X₁X₂X₁X₁X₃X₆X₆X₄X₃X₂X₃X₄X₆
X₃X₉X₃X₁X₁₀
or
X₁₂X₂X₁X₅X₃X₁₀X₅X₆X₃X₆X₅X₁X₂X₁X₁X₃X₆X₆X₄X₁₁X₄X₆X₃
X₉X₃X₁X₁₀
or
X₁₂X₂X₁X₅X₃X₁₀X₅X₆X₃X₆X₅X₁X₂X₁X₁X₃X₆X₆X₄X₁₃X₄X₆X₃
X₉X₃X₁X₁₀

[0152] The RVEp87 is shown by SEQ ID NO. 94 (Ou et al., Diabetologia 43:750 2000).

(SEQ ID NO. 94)

MDFWCVEHDRPPPATPTSLTT

[0153] The improved variants of RVE p87 are shown by SEQ ID NO. 95.

(SEQ ID NO. 95)

X₈X₂X₆X₆X₅X₃X₂X₄X₂X₄X₇X₇X₇X₁X₁₀X₇X₁₀X₅X₃X₁₀X₁₀
or
X₁₂X₈X₂X₆X₆X₅X₃X₂X₄X₂X₄X₇X₇X₇X₁X₁₀X₇X₁₀X₅X₃X₁₀X₁₀
or
X₁₂X₈X₂X₆X₆X₅X₁₁X₄X₂X₄X₇X₇X₇X₁X₁₀X₇X₁₀X₅X₃X₁₀X₁₀

[0154] The GAD65 from positions 247 to 265 is shown by SEQ ID NO. 96.

(SEQ ID NO. 96)

NMYAMMIARFKMFPEVKEKG

[0155] The improved variants GAD65 from positions 247 to 265 are shown by SEQ ID NO. 97.

(SEQ ID NO. 97)

X₉X₈X₆X₁X₈X₈X₃X₁X₄X₆X₄X₈X₆X₇X₂X₃X₄X₂X₄X₁
or
X₁₂X₉X₈X₆X₁X₈X₈X₃X₁X₄X₆X₄X₈X₆X₇X₂X₃X₄X₂X₄X₁
or
X₁₂X₉X₈X₆X₁X₈X₈X₃X₁X₄X₆X₄X₈X₆X₇X₁₁X₄X₂X₄X₁

[0156] The GAD65 from positions 247 to 279 is shown as SEQ ID NO. 98 (Wilson et al., supra JI 167:569 2001 Tisch et al., supra 1999 JI 163: 1178).

(SEQ ID NO. 98)

NMYAMMIARFKMFPEVKEKGMAALPRLIAFTSE

[0157] The improved variants of GAD65 from positions 247 to 279 are shown by SEQ ID NO. 99.

(SEQ ID NO. 99)

X₉X₈X₆X₁X₈X₈X₃X₁X₄X₆X₄X₈X₆X₇X₂X₃X₄X₂X₄X₁X₈X₁X₁X₃X₇
X₄X₃X₃X₁X₆X₁₀X₅X₂
or
X₁₂X₉X₈X₆X₁X₈X₈X₃X₁X₄X₆X₄X₈X₆X₇X₂X₃X₄X₂X₄X₁X₈X₁X₁
X₃X₇X₄X₃X₃X₁X₆X₁₀X₅X₂
or
X₁₂X₉X₈X₆X₁X₈X₈X₃X₁X₄X₆X₄X₈X₆X₇X₁₁X₄X₂X₄X₁X₈X₁X₁X₃
X₇X₄X₁₁X₁X₆X₁₀X₅X₂

[0158] The GAD65 at position 274 is shown as SEQ ID NO. 100 (Karlsson et al., supra, Diabetologia 43:742).

(SEQ ID NO. 100)

IAFTSEHSHFSLK

[0159] The improved variants of GAD65 at position 274 are shown by SEQ ID NO. 101.

(SEQ ID NO. 101)

X₃X₁X₆X₁₀X₅X₂X₄X₅X₄X₆X₅X₃X₄
or
X₁₂X₃X₁X₆X₁₀X₅X₂X₄X₅X₄X₆X₅X₃X₄

[0160] The RVE at position 87 is shown as SEQ ID NO. 102 (Quinn et al., supra JI 167:1748 2001, Herman et al., supra 1999 JI 163:6275, Liu et al., supra Diabetes. 1999 March; 48(3):469-77; Urbank-Ruiz et al., supra Clin Immunol 100 (2): 164-171 2001; Abiru et al., supra Diabetes 50:1274 2001; Elias et al., supra Eur J Immunol 25:2815 1995; Ou et al., supra Diabetologia 43:750 2000).

(SEQ ID NO. 102)

MDFWCVEHDRPPPATPTSLTT

[0161] The improved variants of RVE at position 87 are shown by SEQ ID NO. 103.

(SEQ ID NO. 103)

X₈X₂X₆X₆X₅X₃X₂X₄X₂X₄X₇X₇X₇X₁X₁₀X₇X₁₀X₅X₃X₁₀X₁₀
or
X₁₂X₈X₂X₆X₆X₅X₃X₂X₄X₂X₄X₇X₇X₇X₁X₁₀X₇X₁₀X₅X₃X₁₀X₁₀
or
X₁₂X₈X₂X₆X₆X₅X₁₁X₄X₂X₄X₇X₇X₇X₁X₁₀X₇X₁₀X₅X₃X₁₀X₁₀

[0162] The GAD65 at positions 104-112 is shown by SEQ ID NO. 104 (Ou et al., supra; Sadeharju et al., Enterovirus antibody levels during the first two years of life in prediabetic autoantibody-positive children, 2001 Diabetologia 44(7):818).

(SEQ ID NO. 104)

ERPTLAFLQD

[0163] The improved variants of GAD65 at positions 104-112 are shown by SEQ ID NO. 105.

(SEQ ID NO. 105)

X₂X₄X₇X₁₀X₃X₁X₆X₃X₉X₂
or
X₁₂X₂X₄X₇X₁₀X₃X₁X₆X₃X₉X₂

[0164] The GAD65 at positions 127-136 is shown by SEQ ID NO. 106 (Herman et al., supra).

(SEQ ID NO. 106)

DRSTKVIDFH

[0165] The improved variants of GAD65 at positions 127-136 are shown by SEQ ID NO. 107.

(SEQ ID NO. 107)

X₂X₄X₅X₁₀X₄X₃X₃X₂X₆X₄
or
X₁₂X₂X₄X₅X₁₀X₄X₃X₃X₂X₆X₄
or
X₁₂X₂X₄X₅X₁₀X₄X₁₁X₆X₄
or
X₁₂X₂X₄X₅X₁₀X₄X₁₃X₆X₄

[0166] Peptides from a protein referred to as Type 1 DM-associated autoantigen insulinoma-associated-2 are also contemplated by the invention (Peakman 1999, “Naturally processed and presented epitopes of the islet cell autoantigen IA-2 eluted from HLA-DR4”, J. Clin Invest 04:1449-1457).

[0167] The peptide at positions 654-674 is shown by the SEQ ID NO. 461.

(SEQ ID NO. 461)

VSSVSSQFSDAAQASPSSHSS

[0168] The peptide improved variants are as follows.

(SEQ ID NO. 462)

X₃X₁₀X₁₀X₃X₁₀X₁₀X₉X₇X₁₀X₂X₁X₁X₁₀X₁X₁₀X₇X₁₀X₁₀X₄X₁₀
X₁₀
or

(SEQ ID NO. 464)

X₁₂X₃X₁₀X₁₀X₃X₁₀X₁₀X₉X₇X₁₀X₂X₁X₁X₁₀X₁X₁₀X₇X₁₀X₁₀X₄
X₁₀X₁₀

[0169] The SEQ ID NO. 465 shows the peptide at positions 797-817 (Peakman Id.).

(SEQ ID NO. 465)

MVWESGCTVIVMLTPLVEDGV

[0170] The improved variants of the SEQ ID NO. 465 are as follows.

(SEQ ID NO. 466)

X₈X₃X₆X₂X₁₀X₁X₅X₁₀X₃X₃X₃X₈X₃X₃X₇X₃X₃X₂X₂X₁X₃
or

(SEQ ID NO. 467)

X₁₂X₈X₃X₆X₂X₁₀X₁X₅X₁₀X₃X₃X₃X₈X₃X₃X₇X₃X₃X₂X₂X₁X₃
or

(SEQ ID NO. 468)

X₈X₃X₆X₂X₁₀X₁X₅X₁₀X₁₁X₃X₈X₃X₃X₇X₃X₃X₂X₂X₁X₃
or

(SEQ ID NO. 469)

X₈X₃X₆X₂X₁₀X₁X₅X₁₀X₃X₁₁X₈X₃X₃X₇X₃X₃X₂X₂X₁X₃
or

(SEQ ID NO. 470)

X₈X₃X₆X₂X₁₀X₁X₅X₁₀X₃X₃X₃X₈X₃X₃X₇X₃X₃X₁₁X₁X₃
or

(SEQ ID NO. 471)

X₈X₃X₆X₂X₁₀X₁X₅X₁₀X₁₃X₈X₃X₃X₇X₃X₃X₂X₂X₁X₃
or

(SEQ ID NO. 472)

X₈X₃X₆X₂X₁₀X₁X₅X₁₀X₃X₃X₃X₈X₃X₃X₇X₁₃X₁X₃
or

(SEQ ID NO. 473)

X₈X₃X₆X₂X₁₀X₁X₅X₁₀X₁₃X₈X₃X₃X₇X₁₃X₁X₃
or

(SEQ ID NO. 474)

X₈X₃X₆X₂X₁₀X₁X₅X₁₀X₁₁X₃X₈X₁₁X₇X₁₁X₁₁X₁X₃
or

(SEQ ID NO. 475)

X₁₂X₈X₃X₆X₂X₁₀X₁X₅X₁₀X₁₁X₃X₈X₃X₃X₇X₃X₃X₂X₂X₁X₃
or

(SEQ ID NO. 476)

X₁₂X₈X₃X₆X₂X₁₀X₁X₅X₁₀X₃X₁₁X₈X₃X₃X₇X₃X₃X₂X₂X₁X₃
or

(SEQ ID NO. 477)

X₁₂X₈X₃X₆X₂X₁₀X₁X₅X₁₀X₃X₃X₃X₈X₃X₃X₇X₃X₃X₁₁X₁X₃
or

(SEQ ID NO. 478)

X₁₂X₈X₃X₆X₂X₁₀X₁X₅X₁₀X₁₃X₈X₃X₃X₇X₃X₃X₂X₂X₁X₃
or

(SEQ ID NO. 479)

X₁₂X₈X₃X₆X₂X₁₀X₁X₅X₁₀X₃X₃X₃X₈X₃X₃X₇X₁₃X₁X₃
or

(SEQ ID NO. 480)

X₁₂X₈X₃X₆X₂X₁₀X₁X₅X₁₀X₁₃X₈X₃X₃X₇X₁₃X₁X₃
or

(SEQ ID NO. 481)

X₁₂X₈X₃X₆X₂X₁₀X₁X₅X₁₀X₁₁X₃X₈X₁₁X₇X₁₁X₁₁X₁X₃

[0171] The SEQ ID NO. 482 shows the peptide at positions 854-872 (Peakman Id.).

(SEQ ID NO. 482)

FYLKNVQTQETRTLTQFHF

[0172] The improved variants of as follows SEQ ID NO. 482 are as follows.

(SEQ ID NO. 483)

X₇X₆X₃X₄X₉X₃X₉X₁₀X₉X₂X₃X₄X₁₀X₃X₁₀X₉X₇X₄X₆
or

(SEQ ID NO. 484)

X₁₂X₇X₆X₃X₄X₉X₃X₉X₁₀X₉X₂X₃X₄X₁₀X₃X₁₀X₉X₇X₄X₆
or

(SEQ ID NO. 485)

X₇X₆X₃X₄X₉X₃X₉X₁₀X₉X₁₁X₄X₁₀X₃X₁₀X₉X₇X₄X₆
or

(SEQ ID NO. 486)

X₁₂X₇X₆X₃X₄X₉X₃X₉X₁₀X₉X₁₁X₄X₁₀X₃X₁₀X₉X₇X₄X₆

P1 for Rheumatoid Arthritis

[0173] Various antigens often with defined epitopes recognized for rheumatoid arthritis (RA) are collagen type II 390-402.

[0174] For example, the collagen type II 390-402 as previously described as SEQ ID NO. 1 is shown below.

(SEQ ID NO. 1)

IAGFKGEQGPKGE

[0175] The improved variants of collagen type II 390-402 are as follows.

(SEQ ID NO. 108)

X₃X₁X₁X₆X₄X₁X₂X₉X₁X₇X₄X₁X₂
or
X₁₂X₃X₁X₁X₆X₄X₁X₂X₉X₁X₇X₄X₁X₂

[0176] Peptides from Type II human collagen (Krco et al. (1999 Identification of T cell determinants on human type II collagen recognized by HLA-DQ8 and HLA-DQ6 transgenic mice. J Immunol.163(3):1661-5) referred therein as Peptide G 54-73 is shown by the SEQ ID NO. 487.

(SEQ ID NO. 487)

DGEAGKPGKAGERGPPGPQG

[0177] The improved variants from Type II human collagen are as follows.

(SEQ ID NO. 488)

X₂X₁X₂X₁X₁X₄X₇X₁X₄X₁X₁X₂X₄X₁X₇X₇X₁X₇X₉X₁
or

(SEQ ID NO. 489)

X₁₂X₂X₁X₂X₁X₁X₄X₇X₁X₄X₁X₁X₂X₄X₁X₇X₇X₁X₇X₉X₁

[0178] Peptide K at positions 94-113 is shown by SEQ ID NO. 490 (Krco et al., id.).

(SEQ ID NO. 490)

GLDGAKGEAGAPGVKGESGS

[0179] The improved variants of Peptide K at positions 94-113 SEQ ID NO. 490 are shown as follows.

(SEQ ID NO. 491)

X₁X₃X₂X₁X₁X₄X₁X₂X₁X₁X₁X₇X₁X₃X₄X₁X₂X₁₀X₁X₁₀
or

(SEQ ID NO. 492)

X₁₂X₁X₃X₂X₁X₁X₄X₁X₂X₁X₁X₁X₇X₁X₃X₄X₁X₂X₁₀X₁X₁₀
or

(SEQ ID NO. 493)

X₁X₁₁X₁X₁X₄X₁X₂X₁X₁X₁X₇X₁X₃X₄X₁X₂X₁₀X₁X₁₀
or

(SEQ ID NO. 494)

X₁₂X₁X₁₁X₁X₁X₄X₁X₂X₁X₁X₁X₇X₁X₃X₄X₁X₂X₁₀X₁X₁₀

[0180] Peptide 44 at positions 554-573 is shown by SEQ ID NO. 495 (Krco et al., id.).

(SEQ ID NO. 495)

FERGAAGIAGDKGDRGDVGEK

[0181] The improved variants of Peptide 44 at positions 554-573 of SEQ ID NO. 495 are shown as follows.

(SEQ ID NO. 496)

X₂X₄X₁X₁X₁X₁X₃X₁X₁X₂X₄X₁X₂X₄X₁X₂X₃X₁X₂X₄
or

(SEQ ID NO. 497)

X₁₂X₂X₄X₁X₁X₁X₁X₃X₁X₁X₂X₄X₁X₂X₄X₁X₂X₃X₁X₂X₄
or

(SEQ ID NO. 498)

X₂X₄X₁X₁X₁X₁X₃X₁X₁X₂X₄X₁X₂X₄X₁X₁₁X₁X₂X₄
or

(SEQ ID NO. 499)

X₁₂X₂X₄X₁X₁X₁X₁X₃X₁X₁X₂X₄X₁X₂X₄X₁X₁₁X₁X₂X₄

[0182] The protein Osteopontin (OPN) contains a peptide referred shown by the SEQ ID NO. 500 (Yamamoto et al., (2003) Essential role of the cryptic epitope SLAYGLR within osteopontin in a murine model of rheumatoid arthritis. J. Clin. Invest. 112:181-188).

(SEQ ID NO. 500)

SLAYGLR

[0183] The improved variants Osteopontin (OPN) are shown as follows.

(SEQ ID NO. 501)

X₁₀X₃X₁X₆X₁X₃X₄
or

(SEQ ID NO. 502)

X₁₂X₁₀X₃X₁X₆X₁X₃X₄

[0184] A peptide naJP1 is indicated by SEQ ID NO. 503 (Prakken et al. (2004), Epitope-specific immunotherapy induces immune deviation of proinflammatory T cells in rheumatoid arthritis, Proc Nat Acad Sci USA 101:4228-4233).

(SEQ ID NO. 503)

QKRAAYKQYGHAAFE

[0185] The improved variants of naJP1 are indicated by the following.

(SEQ ID NO. 504)

X₉X₄X₄X₁X₁X₆X₄X₉X₆X₁X₄X₁X₁X₇X₂
or

(SEQ ID NO. 505)

X₁₂X₉X₄X₄X₁X₁X₆X₄X₉X₆X₁X₄X₁X₁X₇X₂

[0186] A peptide dnaJPv is indicated by SEQ ID NO. 506 (Prakken et al., id.).

(SEQ ID NO. 506)

ERAAYDQYGHAAFE

[0187] The improved variants of dnaJPv are indicated by the following.

(SEQ ID NO. 507)

X₂X₄X₁X₁X₆X₂X₉X₆X₁X₄X₁X₁X₇X₂
or

(SEQ ID NO. 508)

X₁₂X₂X₄X₁X₁X₆X₂X₉X₆X₁X₄X₁X₁X₇X₂

P1 for Pemphigus Vulgaris (PV)

[0188] Epidermal cell adhesion molecule desmoglein epitopes of Pemphigus Vulgaris (PV) have been identified (Veldman et al. (2004), “T cell recognition of desmoglein 3 peptides in patients with Pemphigus Vulgaris and healthy individuals. J Immunol. 172:3883-92). The epitopes of interest are indicated as 7 Des3 peptides and in particular, DG3 (342-358) and DG3 (376-392). The epitopes are recognized exclusively by T cell clones from PP individuals.

[0189] For example, the DG3₃₄₂₋₃₅₈ epitope at positions at 342-358 is shown by SEQ ID NO. 509.

(SEQ ID NO. 509)

SVKLSIAVKNKAEFHQS

[0190] The improved versions of the DG3₃₄₂₋₃₅₈ epitope are shown by the following.

(SEQ ID NO. 510)

X₁₀X₃X₄X₃X₁₀X₃X₁X₃X₄X₉X₄X₁X₂X₇X₄X₉X₁₀
or

(SEQ ID NO. 511)

X₁₂X₁₀X₃X₄X₃X₁₀X₃X₁X₃X₄X₉X₄X₁X₂X₇X₄X₉X₁₀

[0191] The epitope DG3₃₇₆₋₃₉₂ at positions at 376-392 is shown by SEQ ID NO. 512.

(SEQ ID NO. 512)

NVREGIAFRPASKTFTV

[0192] The improved versions of the DG3₃₇₆₋₃₉₂ epitope are shown by the following.

(SEQ ID NO. 513)

X₉X₃X₄X₂X₁X₃X₁X₇X₄X₇X₁X₁₀X₄X₁₀X₇X₁₀X₃
or

(SEQ ID NO. 514)

X₁₂X₉X₃X₄X₂X₁X₃X₁X₇X₄X₇X₁X₁₀X₄X₁₀X₇X₁₀X₃

[0193] The epitope for the Dsg1 amino terminus of 45 kDa is shown by SEQ ID NO. 515 (Abreu-Velez et al. (2003), The tryptic cleavage product of the mature form of the bovine desmoglein 1 ectodomain is one of the antigen moieties immunoprecipitated by all sera from symptomatic patients affected by a new variant of endemic pemphigus. Eur J Dermatol. 13:359-66).

(SEQ ID NO. 515)

EXIKFAAAXREGED

[0194] The improved versions of the Dsg1 amino terminus epitope are shown by the following.

(SEQ ID NO. 516)

X₂XX₃X₄X₇X₁X₁X₁XX₄X₂X₁X₂X₂
or

(SEQ ID NO. 517)

X₁₂X₂XX₃X₄X₇X₁X₁X₁XX₄X₂X₁X₂X₂
or

(SEQ ID NO. 518)

X₁₁X₄X₇X₁X₁X₁XX₄X₂X₁X₂X₂
or

(SEQ ID NO. 519)

X₁₃X₄X₇X₁X₁X₁XX₄X₂X₁X₂X₂
or

(SEQ ID NO. 520)

X₁₁X₄X₇X₁X₁X₁XX₄X₂X₁X₁₁
or

(SEQ ID NO. 521)

X₁₃X₄X₇X₁X₁X₁XX₄X₂X₁X₁₁
or

(SEQ ID NO. 522)

X₁₂X₁₁X₄X₇X₁X₁X₁XX₄X₂X₁X₂X₂
or

(SEQ ID NO. 523)

X₁₂X₁₃X₄X₇X₁X₁X₁XX₄X₂X₁X₂X₂
or

(SEQ ID NO. 524)

X₁₂X₁₁X₄X₇X₁X₁X₁XX₄X₂X₁X₁₁
or

(SEQ ID NO. 525)

X₁₂X₁₃X₄X₇X₁X₁X₁XX₄X₂X₁X₁₁

P1 for Multiple Sclerosis

[0195] For Multiple Sclerosis (MS) P1 can be selected from among molecules such as Myelinproteolipid MPL which has the peptide sequence as shown by SEQ ID NO. 2 as previously described.

(SEQ ID NO. 2)

KNIVTPRT

[0196] The improved variants of the MPL peptide are shown by SEQ ID NO. 109.

(SEQ ID NO. 109)

X₄X₉X₃X₃X₁₀X₇X₄X₁₀
or
X₁₂X₄X₉X₃X₃X₁₀X₇X₄X₁₀
or
X₁₂X₄X₉X₁₁X₁₀X₇X₄X₁₀

[0197] An example of the Myelin Proteolipid Protein (MPLP) is the SEQ ID NO. 41 as previously shown.

(SEQ ID NO. 41)

VHFFKNIVTPRTP

[0198] The improved variants of Myelin Proteolipid Protein (MPLP) are as follows.

(SEQ ID NO. 114)

X₃X₄X₆X₆X₄X₉X₃X₃X₁₀X₇X₄X₁₀X₇
or
X₁₂X₃X₄X₆X₆X₄X₉X₃X₃X₁₀X₇X₄X₁₀X₇
or
X₁₂X₃X₄X₆X₆X₄X₉X₁₁X₁₀X₇X₄X₁₀X₇

[0199] The MBP (Myelin Basic Protein) modified at positions 87-99 is shown by SEQ ID NO. 526 (Hammer et al. (1997), HLA class II peptide binding specificity and autoimmunity, Adv Immunol. 66:67-100).

(SEQ ID NO. 526)

VVHFFKNIVTPR

[0200] The improved versions of the MBP (Myelin Basic Protein) modified at positions 87-99 are shown by the following.

(SEQ ID NO. 527)

X₇X₃X₃X₄X₇X₇X₄X₉X₃X₃X₁₀X₇X₄
or

(SEQ ID NO. 528)

X₁₂X₇X₃X₃X₄X₇X₇X₄X₉X₃X₃X₁₀X₇X₄
or

(SEQ ID NO. 529)

X₇X₁₁X₄X₇X₇X₄X₉X₃X₃X₁₀X₇X₄
or

(SEQ ID NO. 530)

X₁₂X₇X₁₁X₄X₇X₇X₄X₉X₃X₃X₁₀X₇X₄
or

(SEQ ID NO. 531)

X₇X₃X₃X₄X₇X₇X₄X₉X₁₁X₁₀X₇X₄
or

(SEQ ID NO. 532)

X₁₂X₇X₃X₃X₄X₇X₇X₄X₉X₁₁X₁₀X₇X₄
or

(SEQ ID NO. 533)

X₇X₃X₃X₄X₇X₇X₄X₉X₃X₃X₁₀X₇X₄
or

(SEQ ID NO. 534)

X₁₂X₇X₃X₃X₄X₇X₇X₄X₉X₃X₃X₁₀X₇X₄
or

(SEQ ID NO. 535)

X₇X₁₁X₄X₇X₇X₄X₉X₁₁X₁₀X₇X₄
or

(SEQ ID NO. 536)

X₁₂X₇X₁₁X₄X₇X₇X₄X₉X₁₁X₁₀X₇X₄

[0201] The myelin proteolipid protein PLP₁₃₉₋₁₅₁ (Ruiz et al. (1999) Suppressive immunization with DNA encoding a self-peptide prevents autoimmune disease: modulation of T cell costimulation. J Immunol. 162:3336-41).

(SEQ ID NO. 537)

HSLGKWLGHPDKF

[0202] The improved versions of the myelin proteolipid protein PLP₁₃₉₋₁₅₁ are shown by the following.

(SEQ ID NO. 538)

X₄X₁₀X₃X₁X₄X₆X₃X₁X₄X₇X₂X₄X₇
or

(SEQ ID NO. 539)

X₁₂X₄X₁₀X₃X₁X₄X₆X₃X₁X₄X₇X₂X₄X₇

[0203] The epitope for Experimental Allergic neuritis from peripheral nerve P2 60-70 or EAN 60-70 is shown by SEQ ID NO. 541 (Araga et al., (1999) A complementary peptide vaccine that induces T cell anergy and prevents experimental allergic neuritis in Lewis rats. J Immunol. 163(1):476-82).

The application's sequence listing, which the Patent Office published only in electronic form, follows.

SEQUENCE LISTING (835 sequences)

SEQ ID NO: 1 - protein, 13 aa, Artificial Sequence
  peptide construct
IAGFKGEQGPKGE

SEQ ID NO: 2 - protein, 8 aa, Artificial Sequence
  peptide construct
KNIVTPRT

SEQ ID NO: 3 - protein, 15 aa, Artificial Sequence
  peptide construct
GDKVSFFCKNKEKKC

SEQ ID NO: 4 - protein, 17 aa, Artificial Sequence
  peptide construct
VLWKKQKDKVAELENSE

SEQ ID NO: 5 - protein, 11 aa, Artificial Sequence
  peptide construct
PSTHVLITHTI

SEQ ID NO: 6 - protein, 15 aa, Artificial Sequence
  peptide construct
DFLPHYKNTSLGHRP

SEQ ID NO: 7 - protein, 4 aa, Artificial Sequence
  peptide construct
GGGS

SEQ ID NO: 8 - protein, 5 aa, Artificial Sequence
  peptide construct
GGGSS

SEQ ID NO: 9 - protein, 5 aa, Artificial Sequence
  peptide construct
GGGGS

SEQ ID NO: 10 - protein, 6 aa, Artificial Sequence
  peptide construct
GGGGSS

SEQ ID NO: 11 - protein, 8 aa, Artificial Sequence
  peptide construct
GGGSGGGS

SEQ ID NO: 12 - protein, 8 aa, Artificial Sequence
  peptide construct
LRGGGGSS

SEQ ID NO: 13 - protein, 9 aa, Artificial Sequence
  peptide construct
VQGEESNDK

SEQ ID NO: 14 - protein, 37 aa, Artificial Sequence
  peptide construct
NGQEEKAGVVSTGLIGGGDSAFDVLSFTAEEKAGVYK

SEQ ID NO: 15 - protein, 15 aa, Artificial Sequence
  peptide construct
NGQEEKAGVVSTGLI

SEQ ID NO: 16 - protein, 19 aa, Artificial Sequence
  peptide construct
DSAFDVLSFTAEEKAGVYK

SEQ ID NO: 17 - protein, 60 aa, Artificial Sequence
  peptide construct
VLWKKQKDKVAELENSEGGGGSQAFTLLPSGDALPSLLRGGGGSSQVRLQPRGMGAHSPG

SEQ ID NO: 18 - protein, 9 aa, Artificial Sequence
  peptide construct
AYMTMKIRN

SEQ ID NO: 19 - protein, 17 aa, Artificial Sequence
  peptide construct
EIIVTHFPFDEQNCSMK

SEQ ID NO: 20 - protein, 31 aa, Artificial Sequence
  peptide construct
AYMTMKIRNGGGGSEIIVTHFPFDEQNCSMK

SEQ ID NO: 21 - protein, 7 aa, Artificial Sequence
  peptide construct
DQTQDTE

SEQ ID NO: 22 - protein, 29 aa, Artificial Sequence
  peptide construct
DQTQDTEGGGGSEIIVTHFPFDEQNCSMK

SEQ ID NO: 23 - protein, 27 aa, Artificial Sequence
  peptide construct
PSTHVLITHTIGGGIAGFKGEQGPKGE

SEQ ID NO: 24 - protein, 15 aa, Artificial Sequence
  peptide construct
DFLPHYKNTSLGHRP

SEQ ID NO: 25 - protein, 31 aa, Artificial Sequence
  peptide construct
DFLPHYKNTSLGHRPGGGIAGFKGEQGPKGE

SEQ ID NO: 26 - protein, 33 aa, Artificial Sequence
  peptide construct
NGQEEKAGVVSTGLIGGGGSIAGFKGEQGPKGE

SEQ ID NO: 27 - protein, 32 aa, Artificial Sequence
  peptide construct
DGQEEKAGVVSTGLIGGGGSIAGFKGEQGPKG

SEQ ID NO: 28 - protein, 31 aa, Artificial Sequence
  peptide construct
DNQLLETCKQDRLRNRRGNGSSTHFEGNLPC

SEQ ID NO: 29 - protein, 55 aa, Artificial Sequence
  peptide construct
DNQLLETCKQDRLRNRRGNGSSTHFEGNLPCGGGGSDSAFDVLSFTAEEKAGVYK

SEQ ID NO: 30 - protein, 26 aa, Artificial Sequence
  peptide construct
DQTQDTEGGGGSSVHFFKNIVTPRTP

SEQ ID NO: 31 - protein, 28 aa, Artificial Sequence
  peptide construct
DQTQDTEGGGGSSGDKVSFFCKNKEKKC

SEQ ID NO: 32 - protein, 30 aa, Artificial Sequence
  peptide construct
DQTQDTEGGGGSSYQQLNSERGVPNENIEN

SEQ ID NO: 33 - protein, 42 aa, Artificial Sequence
  peptide construct
VLWKKQKDKVAELENSEGGGGSSIQTQMKTYSDIDGKLVSEV

SEQ ID NO: 34 - protein, 36 aa, Artificial Sequence
  peptide construct
VLWKKQKDKVAELENSEGGGGSSVFIKRVSNVIIHG

SEQ ID NO: 35 - protein, 38 aa, Artificial Sequence
  peptide construct
VLWKKQKDKVAELENSEGGGGSSIASRRVDGIIAAYQN

SEQ ID NO: 36 - protein, 38 aa, Artificial Sequence
  peptide construct
VLWKKQKDKVAELENSEGGGGSSMKVTVAFNQFGPNRR

SEQ ID NO: 37 - protein, 42 aa, Artificial Sequence
  peptide construct
VLWKKQKDKVAELENSEGGGGSSIDIFASKNFHLQKNTIGTG

SEQ ID NO: 38 - protein, 35 aa, Artificial Sequence
  peptide construct
VLWKKQKDKVAELENSEGGGGSSYFVGKMYFNLID

SEQ ID NO: 39 - protein, 38 aa, Artificial Sequence
  peptide construct
DQTQDTEGGGGSSGIGAVLKVLTTGPALISWIKRKRQQ

SEQ ID NO: 40 - protein, 13 aa, Artificial Sequence
  peptide construct
IAGFKGEQGPKGE

SEQ ID NO: 41 - protein, 13 aa, Artificial Sequence
  peptide construct
VHFFKNIVTPRTP

SEQ ID NO: 42 - protein, 17 aa, Artificial Sequence
  peptide construct
YQQLNSERGVPNENIEN

SEQ ID NO: 43 - protein, 19 aa, Artificial Sequence
  peptide construct
IQTQMKTYSDIDGKLVSEV

SEQ ID NO: 44 - protein, 13 aa, Artificial Sequence
  peptide construct
VFIKRVSNVIIHG

SEQ ID NO: 45 - protein, 15 aa, Artificial Sequence
  peptide construct
MKVTVAFNQFGPNRR

SEQ ID NO: 46 - protein, 15 aa, Artificial Sequence
  peptide construct
IASRRVDGIIAAYQN

SEQ ID NO: 47 - protein, 19 aa, Artificial Sequence
  peptide construct
IDIFASKNFHLQKNTIGTG

SEQ ID NO: 48 - protein, 12 aa, Artificial Sequence
  peptide construct
YFVGKMYFNLID

SEQ ID NO: 49 - protein, 25 aa, Artificial Sequence
  peptide construct
GIGAVLKVLTTGPALISWIKRKRQQ

SEQ ID NO: 50 - protein, 15 aa, Artificial Sequence
  peptide construct
DGQEEKAGVVSTGLI

SEQ ID NO: 51 - protein, 13 aa, Artificial Sequence
  peptide construct
DLLKNGERIEKVE

SEQ ID NO: 52 - protein, 12 aa, Artificial Sequence
  peptide construct
GGGSGTGSGSGS

SEQ ID NO: 53 - protein, 40 aa, Artificial
  peptide construct
DAEFRHDSGYEVHHQKLVFFAEDVGSNKGAIIGLMVGGVV

SEQ ID NO: 54 - protein, 40 aa, Artificial
  peptide construct
  MISC_FEATURE (1)..(1): X is D and E for acidic amino acids
  MOD_RES (1)..(1): ACETYLATION
  MISC_FEATURE (2)..(2): X is A or G
  MISC_FEATURE (3)..(3): X is D and E for acidic amino acids
  MISC_FEATURE (4)..(4): X is F, W or Y for aromatic amino acids
  MISC_FEATURE (5)..(5): X is K, R or H for basic amino acids
  MISC_FEATURE (6)..(6): X is K, R or H for basic amino acids
  MISC_FEATURE (7)..(7): X is D and E for acidic amino acids
  MISC_FEATURE (8)..(8): X is T or S
  MISC_FEATURE (9)..(9): X is A or G
  MISC_FEATURE (10)..(10): X is F, W or Y for aromatic amino acids
  MISC_FEATURE (11)..(11): X is D and E for acidic amino acids
  MOD_RES (11)..(11): 4Abu
  MISC_FEATURE (12)..(12): X is I, L or V
  MISC_FEATURE (13)..(13): X is K, R or H for basic amino acids
  MISC_FEATURE (14)..(14): X is K, R or H for basic amino acids
  MISC_FEATURE (15)..(15): X is N or Q for amidated amino acids
  MISC_FEATURE (16)..(16): X is K, R or H for basic amino acids
  MISC_FEATURE (17)..(17): X is I, L or V
  MOD_RES (17)..(17): 4Abu
  MISC_FEATURE (18)..(18): X is I, L or V
  MISC_FEATURE (19)..(19): X is F, W or Y for aromatic amino acids
  MISC_FEATURE (20)..(20): X is F, W or Y for aromatic amino acids
  MISC_FEATURE (21)..(21): X is A or G
  MISC_FEATURE (22)..(22): X is D and E for acidic amino acids
  MOD_RES (22)..(22): GAMMA-CARBOXYGLUTAMIC ACID HYDROXYLATION
  MISC_FEATURE (23)..(23): X is D and E for acidic amino acids
  MISC_FEATURE (24)..(24): X is I, L or V
  MISC_FEATURE (25)..(25): X is A or G
  MISC_FEATURE (26)..(26): X is C or S
  MISC_FEATURE (27)..(27): X is N or Q for amidated amino acids
  MISC_FEATURE (28)..(28): X is K, R or H for basic amino acids
  MISC_FEATURE (29)..(29): X is A or G
  MISC_FEATURE (30)..(30): X is A or G
  MISC_FEATURE (31)..(31): X is I, L or V
  MOD_RES (31)..(31): 4Abu
  MISC_FEATURE (32)..(32): X is I, L or V
  MISC_FEATURE (33)..(33): X is A or G
  MISC_FEATURE (34)..(34): X is I, L or V
  MISC_FEATURE (35)..(35): X is M or Nle
  MISC_FEATURE (36)..(36): X is I, L or V
  MISC_FEATURE (37)..(37): X is A or G
  MISC_FEATURE (38)..(38): X is A or G
  MISC_FEATURE (39)..(39): X is I, L or V
  MOD_RES (39)..(39): 4Abu
  MISC_FEATURE (40)..(40): X is I, L or V
XXXXXXXXXXXXXXXXXXXXXXXXXXXXXXXXXXXXXXXX

SEQ ID NO: 55 - protein, 28 aa, Artificial
  Completely synthesized peptide construct
DAEFRHDSGYEVHHQKLVFFAENVGSNK

SEQ ID NO: 56 - protein, 28 aa, Artificial
  peptide construct
  MISC_FEATURE (1)..(1): X is D and E for acidic amino acids
  MOD_RES (1)..(1): ACETYLATION
  MISC_FEATURE (2)..(2): X is A or G
  MISC_FEATURE (3)..(3): X is D and E for acidic amino acids
  MISC_FEATURE (4)..(4): X is F, W or Y for aromatic amino acids
  MISC_FEATURE (5)..(5): X is K, R or H for basic amino acids
  MISC_FEATURE (6)..(6): X is K, R or H for basic amino acids
  MISC_FEATURE (7)..(7): X is D and E for acidic amino acids
  MISC_FEATURE (8)..(8): X is T or S
  MISC_FEATURE (9)..(9): X is A or G
  MISC_FEATURE (10)..(10): X is F, W or Y for aromatic amino acids
  MISC_FEATURE (11)..(11): X is D and E for acidic amino acids
  MOD_RES (11)..(11): 4Abu
  MISC_FEATURE (12)..(12): X is I, L or V
  MISC_FEATURE (13)..(13): X is K, R or H for basic amino acids
  MISC_FEATURE (14)..(14): X is K, R or H for basic amino acids
  MISC_FEATURE (15)..(15): X is N or Q for amidated amino acids
  MISC_FEATURE (16)..(16): X is K, R or H for basic aminio acids
  MISC_FEATURE (17)..(17): X is I, L or V
  MOD_RES (17)..(17): 4Abu
  MISC_FEATURE (18)..(18): X is I, L or V
  MISC_FEATURE (19)..(19): X is F, W or Y for aromatic amino acids
  MISC_FEATURE (20)..(20): X is F, W or Y for aromatic amino acids
  MISC_FEATURE (21)..(21): X is A or G
  MISC_FEATURE (22)..(22): X is D and E for acidic amino acids
  MOD_RES (22)..(22): 4Abu
  MOD_RES (22)..(22): GAMMA-CARBOXYGLUTAMIC ACID HYDROXYLATION
  MISC_FEATURE (23)..(23): X is D and E for acidic amino acids
  MISC_FEATURE (24)..(24): X is I, L or V
  MISC_FEATURE (25)..(25): X is A or G
  MISC_FEATURE (26)..(26): X is C or S
  MISC_FEATURE (27)..(27): X is N or Q for amidated amino acids
  MISC_FEATURE (28)..(28): X is K, R or H for basic amino acids
XXXXXXXXXXXXXXXXXXXXXXXXXXXX

SEQ ID NO: 57 - protein, 30 aa, Artificial
  Completely synthesized peptide construct
DAEFRHDSGYEVHHQKLVFFAENVGSNKAI

SEQ ID NO: 58 - protein, 30 aa, Artificial
  peptide construct
  MISC_FEATURE (1)..(1): X is D and E for acidic amino acids
  MOD_RES (1)..(1): ACETYLATION
  MISC_FEATURE (2)..(2): X is A or G
  MISC_FEATURE (3)..(3): X is D and E for acidic amino acids
  MISC_FEATURE (4)..(4): X is F, W or Y for aromatic amino acids
  MISC_FEATURE (5)..(5): X is K, R or H for basic amino acids
  MISC_FEATURE (6)..(6): X is K, R or H for basic amino acids
  MISC_FEATURE (7)..(7): X is D and E for acidic amino acids
  MISC_FEATURE (8)..(8): X is T or S
  MISC_FEATURE (9)..(9): X is A or G
  MISC_FEATURE (10)..(10): X is F, W or Y for aromatic amino acids
  MISC_FEATURE (11)..(11): X is D and E for acidic amino acids
  MOD_RES (11)..(11): 4Abu
  MISC_FEATURE (12)..(12): X is I, L or V
  MISC_FEATURE (13)..(13): X is K, R or H for basic amino acids
  MISC_FEATURE (14)..(14): X is K, R or H for basic amino acids
  MISC_FEATURE (15)..(15): X is N or Q for amidated amino acids
  MISC_FEATURE (16)..(16): X is K, R or H for basic amino acids
  MISC_FEATURE (17)..(17): X is I, L or V
  MOD_RES (17)..(17): 4Abu
  MISC_FEATURE (18)..(18): X is I, L or V
  MISC_FEATURE (19)..(19): X is F, W or Y for aromatic amino acids
  MISC_FEATURE (20)..(20): X is F, W or Y for aromatic amino acids
  MISC_FEATURE (21)..(21): X is A or G
  MISC_FEATURE (22)..(22): X is D and E for acidic amino acids
  MOD_RES (22)..(22): 4Abu
  MOD_RES (22)..(22): GAMMA-CARBOXYGLUTAMIC ACID HYDROXYLATION
  MISC_FEATURE (23)..(23): X is D and E for acidic amino acids
  MISC_FEATURE (24)..(24): X is I, L or V
  MISC_FEATURE (25)..(25): X is A or G
  MISC_FEATURE (26)..(26): X is C or S
  MISC_FEATURE (27)..(27): X is N or Q for amidated amino acids
  MISC_FEATURE (28)..(28): X is K, R or H for basic amino acids
  MISC_FEATURE (29)..(29): X is A or G
  MISC_FEATURE (30)..(30): X is I, L or V
XXXXXXXXXXXXXXXXXXXXXXXXXXXXXX

SEQ ID NO: 59 - protein, 11 aa, Artificial
  Completely synthesized peptide construct
DAEFRHDSGYE

SEQ ID NO: 60 - protein, 11 aa, Artificial
  peptide construct
  MISC_FEATURE (1)..(1): X is D and E for acidic amino acids
  MOD_RES (1)..(1): ACETYLATION
  MISC_FEATURE (2)..(2): X is A or G
  MISC_FEATURE (3)..(3): X is D and E for acidic amino acids
  MISC_FEATURE (4)..(4): X is F, W or Y for aromatic amino acids
  MISC_FEATURE (5)..(5): X is K, R or H for basic amino acids
  MISC_FEATURE (6)..(6): X is K, R or H for basic amino acids
  MISC_FEATURE (7)..(7): X is D and E for acidic amino acids
  MISC_FEATURE (8)..(8): X is T or S
  MISC_FEATURE (9)..(9): X is A or G
  MISC_FEATURE (10)..(10): X is F, W or Y for aromatic amino acids
  MISC_FEATURE (11)..(11): X is D and E for acidic amino acids
XXXXXXXXXXX

SEQ ID NO: 61 - protein, 7 aa, Artificial
  Completely synthesized peptide construct
ENVGSNK

SEQ ID NO: 62 - protein, 7 aa, Artificial
  peptide construct
  MISC_FEATURE (1)..(1): X is D and E for acidic amino acids
  MOD_RES (1)..(1): ACETYLATION
  MOD_RES (1)..(1): 4Abu
  MOD_RES (1)..(1): 4Abu
  MOD_RES (1)..(1): GAMMA-CARBOXYGLUTAMIC ACID HYDROXYLATION
  MISC_FEATURE (2)..(2): X is D and E for acidic amino acids
  MISC_FEATURE (3)..(3): X is I, L or V
  MISC_FEATURE (4)..(4): X is A or G
  MISC_FEATURE (5)..(5): X is C or S
  MISC_FEATURE (6)..(6): X is N or Q for amidated amino acids
  MISC_FEATURE (7)..(7): X is K, R or H for basic amino acids
XXXXXXX

SEQ ID NO: 63 - protein, 12 aa, Artificial
  Completely synthesized peptide construct
DAEFRHDSGYEV

SEQ ID NO: 64 - protein, 12 aa, Artificial
  peptide construct
  MISC_FEATURE (1)..(1): X is D and E for acidic amino acids
  MOD_RES (1)..(1): ACETYLATION
  MISC_FEATURE (2)..(2): X is A or G
  MISC_FEATURE (3)..(3): X is D and E for acidic amino acids
  MISC_FEATURE (4)..(4): X is F, W or Y for aromatic amino acids
  MISC_FEATURE (5)..(5): X is K, R or H for basic amino acids
  MISC_FEATURE (6)..(6): X is K, R or H for basic amino acids
  MISC_FEATURE (7)..(7): X is D and E for acidic amino acids
  MISC_FEATURE (8)..(8): X is T or S
  MISC_FEATURE (9)..(9): X is A or G
  MISC_FEATURE (10)..(10): X is F, W or Y for aromatic amino acids
  MISC_FEATURE (11)..(11): X is D and E for acidic amino acids
  MOD_RES (11)..(11): 4Abu
  MISC_FEATURE (12)..(12): X is I, L or V
XXXXXXXXXXXX

SEQ ID NO: 65 - protein, 10 aa, Artificial
  Completely synthesized peptide construct
DAEFRHDSGY

SEQ ID NO: 66 - protein, 10 aa, Artificial
  peptide construct
  MISC_FEATURE (1)..(1): X is D and E for acidic amino acids
  MOD_RES (1)..(1): ACETYLATION
  MISC_FEATURE (2)..(2): X is A or G
  MISC_FEATURE (3)..(3): X is D and E for acidic amino acids
  MISC_FEATURE (4)..(4): X is F, W or Y for aromatic amino acids
  MISC_FEATURE (5)..(5): X is K, R or H for basic amino acids
  MISC_FEATURE (6)..(6): X is K, R or H for basic amino acids
  MISC_FEATURE (7)..(7): X is D and E for acidic amino acids
  MISC_FEATURE (8)..(8): X is T or S
  MISC_FEATURE (9)..(9): X is A or G
  MISC_FEATURE (10)..(10): X is F, W or Y for aromatic amino acids
XXXXXXXXXX

SEQ ID NO: 67 - protein, 4 aa, Artificial
  Completely synthesized peptide construct
EFRH

SEQ ID NO: 68 - protein, 4 aa, Artificial
  peptide construct
  MISC_FEATURE (1)..(1): X is D and E for acidic amino acids
  MOD_RES (1)..(1): ACETYLATION
  MISC_FEATURE (2)..(2): X is F or P
  MISC_FEATURE (3)..(3): X is K, R or H for basic amino acids
  MISC_FEATURE (4)..(4): X is K, R or H for basic amino acids
XXXX

SEQ ID NO: 69 - protein, 19 aa, Artificial
  peptide construct
  MISC_FEATURE (1)..(1): X is D and E for acidic amino acids
  MOD_RES (1)..(1): ACETYLATION
  MISC_FEATURE (2)..(2): X is C or S
  MISC_FEATURE (3)..(3): X is A or G
  MISC_FEATURE (4)..(4): X is F, W or Y for aromatic amino acids
  MISC_FEATURE (5)..(5): X is D and E for acidic amino acids
  MOD_RES (5)..(5): GAMMA-CARBOXYGLUTAMIC ACID HYDROXYLATION
  MOD_RES (5)..(5): 4Abu
  MISC_FEATURE (6)..(6): X is I, L or V
  MISC_FEATURE (7)..(7): X is I, L or V
  MISC_FEATURE (8)..(8): X is C or S
  MISC_FEATURE (9)..(9): X is F, W or Y for aromatic amino acids
  MISC_FEATURE (10)..(10): X is T or S
  MISC_FEATURE (11)..(11): X is A or G
  MISC_FEATURE (12)..(12): X is D and E for acidic amino acids
  MOD_RES (12)..(12): 4Abu
  MISC_FEATURE (13)..(13): X is D and E for acidic amino acids
  MISC_FEATURE (14)..(14): X is K, R or H for basic amino acids
  MISC_FEATURE (15)..(15): X is A or G
  MISC_FEATURE (16)..(16): X is A or G
  MISC_FEATURE (17)..(17): X is I, L or V
  MISC_FEATURE (18)..(18): X is F, W or Y for aromatic amino acids
  MISC_FEATURE (19)..(19): X is K, R or H for basic amino acids
XXXXXXXXXXXXXXXXXXX

SEQ ID NO: 70 - protein, 14 aa, Artificial
  Completely synthesized peptide construct
  MOD_RES (1)..(1): ACETYLATION
SLKLMATLFSTYAS

SEQ ID NO: 71 - protein, 14 aa, Artificial
  Completely synthesized peptide construct
  MISC_FEATURE (1)..(1): X is C or S
  MISC_FEATURE (2)..(2): X is I, L or V
  MISC_FEATURE (3)..(3): X is K, R or H for basic amino acids
  MISC_FEATURE (4)..(4): X is I, L or V
  MISC_FEATURE (5)..(5): X is M or Nle
  MISC_FEATURE (6)..(6): X is A or G
  MISC_FEATURE (7)..(7): X is T or S
  MISC_FEATURE (8)..(8): X is I, L or V
  MISC_FEATURE (9)..(9): X is F or P
  MISC_FEATURE (10)..(10): X is C or S
  MISC_FEATURE (11)..(11): X is T or S
  MISC_FEATURE (12)..(12): X is F, W or Y for aromatic amino acids
  MISC_FEATURE (13)..(13): X is A or G
  MISC_FEATURE (14)..(14): X is C or S
XXXXXXXXXXXXXX

SEQ ID NO: 72 - protein, 14 aa, Artificial
  Completely synthesized peptide construct
  MOD_RES (1)..(1): ACETYLATION
SLKLMATLFSSYAT

SEQ ID NO: 73 - protein, 14 aa, Artificial
  Completely synthesized peptide construct
  MOD_RES (1)..(1): ACETYLATION
  MISC_FEATURE (2)..(2): X is C or S
  MISC_FEATURE (3)..(3): X is I, L or V
  MISC_FEATURE (4)..(4): X is K, R or H for basic amino acids
  MISC_FEATURE (5)..(5): X is I, L or V
  MISC_FEATURE (6)..(6): X is M or Nle
  MISC_FEATURE (7)..(7): X is A or G
  MISC_FEATURE (8)..(8): X is Tor S
  MISC_FEATURE (9)..(9): X is I, L or V
  MISC_FEATURE (10)..(10): X is F or P
  MISC_FEATURE (11)..(11): X is C or S
  MISC_FEATURE (12)..(12): X is C or S
  MISC_FEATURE (13)..(13): X is F, W or Y for aromatic amino acids
  MISC_FEATURE (14)..(14): X is A or G
  MISC_FEATURE (15)..(15): X is T or S
XXXXXXXXXXXXXX

SEQ ID NO: 74 - protein, 11 aa, Artificial
  Completely synthesized peptide construct
NITEIADLTQK

SEQ ID NO: 75 - protein, 11 aa, Artificial
  peptide construct
  MISC_FEATURE (1)..(1): X is N or Q for amidated amino acids
  MOD_RES (1)..(1): ACETYLATION
  MISC_FEATURE (2)..(2): X is I, L or V
  MISC_FEATURE (3)..(3): X is T or S
  MISC_FEATURE (4)..(4): X is D and E for acidic amino acids
  MOD_RES (4)..(4): 4Abu
  MISC_FEATURE (5)..(5): X is I, L or V
  MISC_FEATURE (6)..(6): X is A or G
  MISC_FEATURE (7)..(7): X is D and E for acidic amino acids
  MOD_RES (7)..(7): 4Abu
  MISC_FEATURE (8)..(8): X is I, L or V
  MISC_FEATURE (9)..(9): X is T or S
  MISC_FEATURE (10)..(10): X is N or Q for amidated amino acids
  MISC_FEATURE (11)..(11): X is K, R or H for basic amino acids
XXXXXXXXXXX

SEQ ID NO: 76 - protein, 40 aa, Artificial
  Completely synthesized peptide construct
NMYAMMIARFKMFPEVKEKGMAALPRLIAFTSEHSHFSLK

SEQ ID NO: 77 - protein, 40 aa, Artificial; identical to SEQ ID NO: 54
  peptide construct
  MISC_FEATURE (1)..(1): X is N or Q for amidated amino acids
  MOD_RES (1)..(1): ACETYLATION
  MISC_FEATURE (2)..(2): X is M or Nle
  MISC_FEATURE (3)..(3): X is F, W or Y for aromatic amino acids
  MISC_FEATURE (4)..(4): X is A or G
  MISC_FEATURE (5)..(5): X is M or Nle
  MISC_FEATURE (6)..(6): X is M or Nle
  MISC_FEATURE (7)..(7): X is I, L or V
  MISC_FEATURE (8)..(8): X is A or G
  MISC_FEATURE (9)..(9): X is K, R or H for basic amino acids
  MISC_FEATURE (10)..(10): X is F, W or Y for aromatic amino acids
  MISC_FEATURE (11)..(11): X is K, R or H for basic amino acids
  MISC_FEATURE (12)..(12): X is M or Nle
  MISC_FEATURE (13)..(13): X is F, W or Y for aromatic amino acids
  MISC_FEATURE (14)..(14): X is F or P
  MISC_FEATURE (15)..(15): X is D and E for acidic amino acids
  MOD_RES (15)..(15): 4Abu
  MISC_FEATURE (16)..(16): X is I, L or V
  MISC_FEATURE (17)..(17): X is K, R or H for basic amino acids
  MISC_FEATURE (18)..(18): X is D and E for acidic amino acids
  MISC_FEATURE (19)..(19): X is K, R or H for basic amino acids
  MISC_FEATURE (20)..(20): X is A or G
  MISC_FEATURE (21)..(21): X is M or Nle
  MISC_FEATURE (22)..(22): X is A or G
  MISC_FEATURE (23)..(23): X is A or G
  MISC_FEATURE (24)..(24): X is I, L or V
  MISC_FEATURE (25)..(25): X is F or P
  MISC_FEATURE (26)..(26): X is K, R or H for basic amino acids
  MISC_FEATURE (27)..(27): X is I, L or V
  MOD_RES (27)..(27): 4Abu
  MISC_FEATURE (28)..(28): X is I, L or V
  MISC_FEATURE (29)..(29): X is A or G
  MISC_FEATURE (30)..(30): X is F, W or Y for aromatic amino acids
  MISC_FEATURE (31)..(31): X is T or S
  MISC_FEATURE (32)..(32): X is C or S
  MISC_FEATURE (33)..(33): X is D and E for acidic amino acids
  MISC_FEATURE (34)..(34): X is K, R or H for basic amino acids
  MISC_FEATURE (35)..(35): X is C or S
  MISC_FEATURE (36)..(36): X is K, R or H for basic amino acids
  MISC_FEATURE (37)..(37): X is F, W or Y for aromatic amino acids
  MISC_FEATURE (38)..(38): X is C or S
  MISC_FEATURE (39)..(39): X is I, L or V
  MISC_FEATURE (40)..(40): X is K, R or H for basic amino acids

SEQ ID NO: 78 - protein, 34 aa, Artificial
  Completely synthesized peptide construct
IARFKMFPEVKEKGMAALPRLIAFTSEHSHFSLK

SEQ ID NO: 79 - protein, 34 aa, Artificial
  peptide construct
  MISC_FEATURE (1)..(1): X is I, L or V
  MOD_RES (1)..(1): ACETYLATION
  MISC_FEATURE (2)..(2): X is A or G
  MISC_FEATURE (3)..(3): X is K, R or H for basic amino acids
  MISC_FEATURE (4)..(4): X is F, W or Y or aromatic amino acids
  MISC_FEATURE (5)..(5): X is K, R or H for basic amino acids
  MISC_FEATURE (6)..(6): X is M or Nle
  MISC_FEATURE (7)..(7): X is F,  W or Y for aromatic amino acids
  MISC_FEATURE (8)..(8): X is F or P
  MISC_FEATURE (9)..(9): X is D and E for acidic amino acids
  MISC_FEATURE (10)..(10): X is I, L or V
  MISC_FEATURE (11)..(11): X is K, R or H for basic amino acids
  MISC_FEATURE (12)..(12): X is D and E for acidic amino acids
  MISC_FEATURE (13)..(13): X is K, R or H for basic amino acids
  MISC_FEATURE (14)..(14): X is A or G
  MISC_FEATURE (15)..(15): X is M or Nle
  MISC_FEATURE (16)..(16): X is A or G
  MISC_FEATURE (17)..(17): X is A or G
  MISC_FEATURE (18)..(18): X is I, L or V
  MISC_FEATURE (19)..(19): X is  F or P
  MISC_FEATURE (20)..(20): X is K, R or H for basic amino acids
  MISC_FEATURE (21)..(21): X is I, L or V
  MOD_RES (21)..(21): 4Abu
  MISC_FEATURE (22)..(22): X is I, L or V
  MISC_FEATURE (23)..(23): X is A or G
  MISC_FEATURE (24)..(24): X is F, W or Y for aromatic amino acids
  MISC_FEATURE (25)..(25): X is T or S
  MISC_FEATURE (26)..(26): X is C or S
  MISC_FEATURE (27)..(27): X is D and E for acidic amino acids
  MISC_FEATURE (28)..(28): X is K, R or H for basic amino acids
  MISC_FEATURE (29)..(29): X is C or S
  MISC_FEATURE (30)..(30): X is K, R or H for basic amino acids
  MISC_FEATURE (31)..(31): X is F, W or Y for aromatic amino acids
  MISC_FEATURE (32)..(32): X is C or S
  MISC_FEATURE (33)..(33): X is C or S
  MISC_FEATURE (34)..(34): X is I, L or V
  MISC_FEATURE (35)..(35): X is K, R or H for basic amino acids
XXXXXXXXXXXXXXXXXXXXXXXXXXXXXXXXXX

SEQ ID NO: 80 - protein, 20 aa, Artificial
  Completely synthesized peptide construct
SRLSKVAPVIKARMMEYGTT

SEQ ID NO: 81 - protein, 20 aa, Artificial
  Completely synthesized peptide construct
  MISC_FEATURE (1)..(1): X is C or S
  MOD_RES (1)..(1): ACETYLATION
  MISC_FEATURE (2)..(2): X is K, R or H for basic amino acids
  MISC_FEATURE (3)..(3): X is I, L or V
  MISC_FEATURE (4)..(4): X is C or S
  MISC_FEATURE (5)..(5): X is K, R or H for basic amino acids
  MISC_FEATURE (6)..(6): X is I, L or V
  MISC_FEATURE (7)..(7): X is A or G
  MISC_FEATURE (8)..(8): X is F or P
  MISC_FEATURE (9)..(9): X is I, L or V
  MISC_FEATURE (10)..(10): X is I, L or V
  MISC_FEATURE (11)..(11): X is K, R or H for basic amino acids
  MISC_FEATURE (12)..(12): X is A or G
  MISC_FEATURE (13)..(13): X is K, R or H for basic amino acids
  MISC_FEATURE (14)..(14): X is M or Nle
  MISC_FEATURE (15)..(15): X is M or Nle
  MISC_FEATURE (16)..(16): X is D or E for  acidic amino acids
  MISC_FEATURE (17)..(17): X is F, W or Y for aromatic amino acids
  MISC_FEATURE (18)..(18): X is A or G
  MISC_FEATURE (19)..(19): X is T or S
  MISC_FEATURE (20)..(20): X is T or S
XXXXXXXXXXXXXXXXXXXX

SEQ ID NO: 82 - protein, 19 aa, Artificial
  Completely synthesized peptide construct
IPPSLRYLEDEERMSRLSK

SEQ ID NO: 83 - protein, 18 aa, Artificial
  peptide construct
  MISC_FEATURE (1)..(1): X is I, L or V
  MOD_RES (1)..(1): acetylation
  MOD_RES (1)..(1): GAMMA-CARBOXYGLUTAMIC ACID HYDROXYLATION
  MISC_FEATURE (2)..(2): X is F or P
  MISC_FEATURE (3)..(3): X is F or P
  MISC_FEATURE (4)..(4): X is C or S
  MISC_FEATURE (5)..(5): X is I, L or V
  MISC_FEATURE (6)..(6): X is K, R or H for basic amino acids
  MISC_FEATURE (7)..(7): X is F, W or Y for aromatic amino acids
  MISC_FEATURE (8)..(8): X is D and E for acidic amino acids
  MISC_FEATURE (9)..(9): X is D and E for acidic amino acids
  MISC_FEATURE (10)..(10): X is D and E for acidic amino acids
  MISC_FEATURE (11)..(11): X is D and E for acidic amino acids
  MISC_FEATURE (12)..(12): X is K, R or H for basic amino acids
  MISC_FEATURE (13)..(13): X is M or Nle
  MISC_FEATURE (14)..(14): X is C or S
  MISC_FEATURE (15)..(15): X is K, R or H for basic amino acids
  MISC_FEATURE (16)..(16): X is I, L or V
  MISC_FEATURE (17)..(17): X is C or S
  MISC_FEATURE (18)..(18): X is K, R or H for basic amino acids
XXXXXXXXXXXXXXXXXX

SEQ ID NO: 84 - protein, 20 aa, Artificial
  Completely synthesized peptide construct
NTNMFTYEIAPVFVLLEYVT

SEQ ID NO: 85 - protein, 20 aa, Artificial
  peptide construct
  MISC_FEATURE (1)..(1): X is N or Q for amidated amino acids
  MOD_RES (1)..(1): ACETYLATION
  MISC_FEATURE (2)..(2): X is T or S
  MISC_FEATURE (3)..(3): X is N or Q for amidated amino acids
  MISC_FEATURE (4)..(4): X is M or Nle
  MISC_FEATURE (5)..(5): X is F, W or Y for aromatic amino acids
  MISC_FEATURE (6)..(6): X is T or S
  MISC_FEATURE (7)..(7): X is F, W or Y for aromatic amino acids
  MISC_FEATURE (8)..(8): X is D and E for acidic amino acids
  MOD_RES (8)..(8): 4Abu
  MISC_FEATURE (9)..(9): X is I, L or V
  MISC_FEATURE (10)..(10): X is A or G
  MISC_FEATURE (11)..(11): X is F or P
  MISC_FEATURE (12)..(12): X is I, L or V
  MISC_FEATURE (13)..(13): X is F, W or Y for aromatic amino acids
  MISC_FEATURE (14)..(14): X is I, L or V
  MOD_RES (14)..(14): 4Abu
  MOD_RES (14)..(14): 4Abu
  MOD_RES (14)..(14): GAMMA-CARBOXYGLUTAMIC ACID HYDROXYLATION
  MISC_FEATURE (15)..(15): X is I, L or V
  MISC_FEATURE (16)..(16): X is I, L or V
  MISC_FEATURE (17)..(17): X is D and E for acidic amino acids
  MISC_FEATURE (18)..(18): X is F, W or Y for aromatic amino acids
  MISC_FEATURE (19)..(19): X is I, L or V
  MISC_FEATURE (20)..(20): X is T or S
XXXXXXXXXXXXXXXXXXXX

SEQ ID NO: 86 - protein, 15 aa, Artificial
  Completely synthesized peptide construct
FKADEKKFWGKYLYE

SEQ ID NO: 87 - protein, 15 aa, Artificial
  peptide construct
  MISC_FEATURE (1)..(1): X is F, W or Y for aromatic amino acids
  MOD_RES (1)..(1): ACETYLATION
  MISC_FEATURE (2)..(2): X is K, R or H for basic amino acids
  MISC_FEATURE (3)..(3): X is A or G
  MISC_FEATURE (4)..(4): X is D and E for acidic amino acids
  MOD_RES (4)..(4): 4Abu
  MISC_FEATURE (5)..(5): X is D and E for acidic amino acids
  MISC_FEATURE (6)..(6): X is K, R or H for basic amino acids
  MISC_FEATURE (7)..(7): X is K, R or H for basic amino acids
  MISC_FEATURE (8)..(8): X is F, W or Y for aromatic amino acids
  MISC_FEATURE (9)..(9): X is F, W or Y for aromatic amino acids
  MISC_FEATURE (10)..(10): X is A or G
  MISC_FEATURE (11)..(11): X is K, R or H for basic amino acids
  MISC_FEATURE (12)..(12): X is F, W or Y for aromatic amino acids
  MISC_FEATURE (13)..(13): X is I, L or V
  MISC_FEATURE (14)..(14): X is F, W or Y for aromatic amino acids
  MISC_FEATURE (15)..(15): X is D and E for acidic amino acids
XXXXXXXXXXXXXXX

SEQ ID NO: 88 - protein, 15 aa, Artificial
  Completely synthesized peptide construct
SHLVEALYLVCGERG

SEQ ID NO: 89 - protein, 14 aa, Artificial
  peptide construct
  MISC_FEATURE (1)..(1): X is C or S
  MOD_RES (1)..(1): ACETYLATION
  MISC_FEATURE (2)..(2): X is K, R or H for basic amino acids
  MISC_FEATURE (3)..(3): X is I, L or V
  MOD_RES (3)..(3): 4Abu
  MOD_RES (3)..(3): GAMMA-CARBOXYGLUTAMIC ACID HYDROXYLATION
  MISC_FEATURE (4)..(4): X is I, L or V
  MISC_FEATURE (5)..(5): X is D and E for acidic amino acids
  MISC_FEATURE (6)..(6): X is  A or G
  MISC_FEATURE (7)..(7): X is I, L or V
  MISC_FEATURE (8)..(8): X is F, W or Y for aromatic amino acids
  MISC_FEATURE (9)..(9): X is I, L or V
  MISC_FEATURE (10)..(10): X is C or S
  MISC_FEATURE (11)..(11): X is A or G
  MISC_FEATURE (12)..(12): X is D and E for acidic amino acids
  MISC_FEATURE (13)..(13): X is K, R or H for basic amino acids
  MISC_FEATURE (14)..(14): X is A or G
XXXXXXXXXXXXXX

SEQ ID NO: 90 - protein, 24 aa, Artificial
  Completely synthesized peptide construct
VLGGGCALLRCIPALDSLTPANED

SEQ ID NO: 91 - protein, 24 aa, Artificial
  peptide construct
  MISC_FEATURE (1)..(1): X is I, L or V
  MOD_RES (1)..(1): ACETYLATION
  MOD_RES (1)..(1): 4Abu
  MISC_FEATURE (2)..(2): X is I, L or V
  MISC_FEATURE (3)..(3): X is A or G
  MISC_FEATURE (4)..(4): X is A or G
  MISC_FEATURE (5)..(5): X is A or G
  MISC_FEATURE (6)..(6): X is C or S
  MISC_FEATURE (7)..(7): X is A or G
  MISC_FEATURE (8)..(8): X is I, L or V
  MOD_RES (8)..(8): 4Abu
  MISC_FEATURE (9)..(9): X is I, L or V
  MISC_FEATURE (10)..(10): X is K, R or H for basic amino acids
  MISC_FEATURE (11)..(11): X is  C or S
  MISC_FEATURE (12)..(12): X is I, L or V
  MISC_FEATURE (13)..(13): X is F or P
  MISC_FEATURE (14)..(14): X is A or G
  MISC_FEATURE (15)..(15): X is I, L or V
  MOD_RES (15)..(15): 4Abu
  MISC_FEATURE (16)..(16): X is D and E for acidic amino acids
  MISC_FEATURE (17)..(17): X is C or S
  MISC_FEATURE (18)..(18): X is I, L or V
  MISC_FEATURE (19)..(19): X is T or S
  MISC_FEATURE (20)..(20): X is F or P
  MISC_FEATURE (21)..(21): X is A or G
  MISC_FEATURE (22)..(22): X is N or Q for amidated amino acids
  MISC_FEATURE (23)..(23): X is D and E for acidic amino acids
  MOD_RES (23)..(23): 4Abu
  MISC_FEATURE (24)..(24): X is D and E for acidic amino acids
XXXXXXXXXXXXXXXXXXXXXXXX

SEQ ID NO: 92 - protein, 28 aa, Artificial
  Completely synthesized peptide construct
EACVTSWLWSGEGAVFYRVDLHFINLGT

SEQ ID NO: 93 - protein, 28 aa, Artificial
  peptide construct
  MISC_FEATURE (1)..(1): X is D and E for acidic amino acids
  MOD_RES (1)..(1): ACETYLATION
  MISC_FEATURE (2)..(2): X is A or G
  MISC_FEATURE (3)..(3): X is C or S
  MISC_FEATURE (4)..(4): X is I, L or V
  MISC_FEATURE (5)..(5): X is T or S
  MISC_FEATURE (6)..(6): X is C or S
  MISC_FEATURE (7)..(7): X is F, W or Y for aromatic amino acids
  MISC_FEATURE (8)..(8): X is I, L or V
  MISC_FEATURE (9)..(9): X is F, W or Y for aromatic amino acids
  MISC_FEATURE (10)..(10): X is C or S
  MISC_FEATURE (11)..(11): X is A or G
  MISC_FEATURE (12)..(12): X is D and E for acidic amino acids
  MISC_FEATURE (13)..(13): X is A or G
  MISC_FEATURE (14)..(14): X is A or G
  MISC_FEATURE (15)..(15): X is I,  L or V
  MISC_FEATURE (16)..(16): X is F, W or Y for aromatic amino acids
  MISC_FEATURE (17)..(17): X is F, W or Y for aromatic amino acids
  MISC_FEATURE (18)..(18): X is K, R or H for basic amino acids
  MISC_FEATURE (19)..(19): X is I, L or V
  MOD_RES (19)..(19): 4Abu
  MOD_RES (19)..(19): GAMMA-CARBOXYGLUTAMIC ACID HYDROXYLATION
  MISC_FEATURE (20)..(20): X is D and E for acidic amino acids
  MISC_FEATURE (21)..(21): X is I, L or V
  MISC_FEATURE (22)..(22): X is K, R or H for basic amino acids
  MISC_FEATURE (23)..(23): X is F, W or Y for aromatic amino acids
  MISC_FEATURE (24)..(24): X is I, L or V
  MISC_FEATURE (25)..(25): X is N or Q for amidated amino acids
  MISC_FEATURE (26)..(26): X is I, L or V
  MISC_FEATURE (27)..(27): X is  A or G
  MISC_FEATURE (28)..(28): X is T or S
XXXXXXXXXXXXXXXXXXXXXXXXXXXX

SEQ ID NO: 94 - protein, 21 aa, Artificial
  Completely synthesized peptide construct
MDFWCVEHDRPPPATPTSLTT

SEQ ID NO: 95 - protein, 21 aa, Artificial
  peptide construct
  MISC_FEATURE (1)..(1): X is M or Nle
  MOD_RES (1)..(1): ACETYLATION
  MISC_FEATURE (2)..(2): X is D and E for acidic amino acids
  MISC_FEATURE (3)..(3): X is F, W or Y for aromatic amino acids
  MISC_FEATURE (4)..(4): X is F, W or Y for aromatic amino acids
  MISC_FEATURE (5)..(5): X is C or S
  MISC_FEATURE (6)..(6): X is I, L or V
  MOD_RES (6)..(6): 4Abu
  MISC_FEATURE (7)..(7): X is D and E for acidic amino acids
  MISC_FEATURE (8)..(8): X is K, R or H for basic amino acids
  MISC_FEATURE (9)..(9): X is D and E for acidic amino acids
  MISC_FEATURE (10)..(10): X is K, R or H for basic amino acids
  MISC_FEATURE (11)..(11): X is F or P
  MISC_FEATURE (12)..(12): X is F or P
  MISC_FEATURE (13)..(13): X is F or P
  MISC_FEATURE (14)..(14): X is A or G
  MISC_FEATURE (15)..(15): X is T or S
  MISC_FEATURE (16)..(16): X is F or P
  MISC_FEATURE (17)..(17): X is T or S
  MISC_FEATURE (18)..(18): X is  C or S
  MISC_FEATURE (19)..(19): X is I, L or V
  MISC_FEATURE (20)..(20): X is T or S
  MISC_FEATURE (21)..(21): X is T or S
XXXXXXXXXXXXXXXXXXXXX

SEQ ID NO: 96 - protein, 20 aa, Artificial
  Completely synthesized peptide construct
NMYAMMIARFKMFPEVKEKG

SEQ ID NO: 97 - protein, 20 aa, Artificial
  peptide construct
  MISC_FEATURE (1)..(1): X is N or Q for amidated amino acids
  MOD_RES (1)..(1): ACETYLATION
  MISC_FEATURE (2)..(2): X is M or Nle
  MISC_FEATURE (3)..(3): X is F, W or Y for aromatic amino acids
  MISC_FEATURE (4)..(4): X is A or G
  MISC_FEATURE (5)..(5): X is M or Nle
  MISC_FEATURE (6)..(6): X is M or Nle
  MISC_FEATURE (7)..(7): X is I, L or V
  MISC_FEATURE (8)..(8): X is A or G
  MISC_FEATURE (9)..(9): X is K, R or H for basic amino acids
  MISC_FEATURE (10)..(10): X is F, W or Y for aromatic amino acids
  MISC_FEATURE (11)..(11): X is K, R or H for basic amino acids
  MISC_FEATURE (12)..(12): X is M or Nle
  MISC_FEATURE (13)..(13): X is F, W or Y for aromatic amino acids
  MISC_FEATURE (14)..(14): X is F or P
  MISC_FEATURE (15)..(15): X is D and E for acidic amino acids
  MOD_RES (15)..(15): 4Abu
  MISC_FEATURE (16)..(16): X is I, L or V
  MISC_FEATURE (17)..(17): X is K, R or H for basic amino acids
  MISC_FEATURE (18)..(18): X is D and E for acidic amino acids
  MISC_FEATURE (19)..(19): X is K, R or H for basic amino acids
  MISC_FEATURE (20)..(20): X is  A or G
XXXXXXXXXXXXXXXXXXXX

SEQ ID NO: 98 - protein, 33 aa, Artificial
  Completely synthesized peptide construct
NMYAMMIARFKMFPEVKEKGMAALPRLIAFTSE

SEQ ID NO: 99 - protein, 33 aa, Artificial
  peptide construct
  MISC_FEATURE (1)..(1): X is N or Q for amidated amino acids
  MOD_RES (1)..(1): ACETYLATION
  MISC_FEATURE (1)..(1): X is N or Q for amidated amino acids
  MISC_FEATURE (2)..(2): X is M or Nle
  MISC_FEATURE (3)..(3): X is F, W or Y for aromatic amino acids
  MISC_FEATURE (4)..(4): X is A or G
  MISC_FEATURE (5)..(5): X is M or Nle
  MISC_FEATURE (6)..(6): X is M or Nle
  MISC_FEATURE (7)..(7): X is I, L or V
  MISC_FEATURE (8)..(8): X is A or G
  MISC_FEATURE (9)..(9): X is K, R or H for basic amino acids
  MISC_FEATURE (10)..(10): X is F, W or Y for aromatic amino acids
  MISC_FEATURE (11)..(11): X is K, R or H for basic amino acids
  MISC_FEATURE (12)..(12): X is M or Nle
  MISC_FEATURE (13)..(13): X is F, W or Y for aromatic amino acids
  MISC_FEATURE (14)..(14): X is F or P
  MISC_FEATURE (15)..(15): X is D and E for acidic amino acids
  MOD_RES (15)..(15): 4Abu
  MISC_FEATURE (16)..(16): X is I, L or V
  MISC_FEATURE (17)..(17): X is K, R or H for basic amino acids
  MISC_FEATURE (18)..(18): X is D and E for acidic amino acids
  MISC_FEATURE (19)..(19): X is K, R or H for basic amino acids
  MISC_FEATURE (20)..(20): X is A or G
  MISC_FEATURE (21)..(21): X is M or Nle
  MISC_FEATURE (22)..(22): X is A or G
  MISC_FEATURE (23)..(23): X is A or G
  MISC_FEATURE (24)..(24): X is I, L or V
  MISC_FEATURE (25)..(25): X is F or P
  MISC_FEATURE (26)..(26): X is K, R or H for basic amino acids
  MISC_FEATURE (27)..(27): X is I, L or V
  MOD_RES (27)..(27): 4Abu
  MISC_FEATURE (28)..(28): X is I, L or V
  MISC_FEATURE (29)..(29): X is A or G
  MISC_FEATURE (30)..(30): X is F, W or Y or aromatic amino acids
  MISC_FEATURE (31)..(31): X is T or S
  MISC_FEATURE (32)..(32): X is C or S
  MISC_FEATURE (33)..(33): X is D and E for acidic amino acids
XXXXXXXXXXXXXXXXXXXXXXXXXXXXXXXXX

SEQ ID NO: 100 - protein, 13 aa, Artificial
  Completely synthesized peptide construct
IAFTSEHSHFSLK

SEQ ID NO: 101 - protein, 13 aa, Artificial
  peptide construct
  MISC_FEATURE (1)..(1): X is I, L or V
  MOD_RES (1)..(1): ACETYLATION
  MISC_FEATURE (2)..(2): X is A or G
  MISC_FEATURE (3)..(3): X is F, W or Y for aromatic amino acids
  MISC_FEATURE (4)..(4): X is T or S
  MISC_FEATURE (5)..(5): X is C or S
  MISC_FEATURE (6)..(6): X is D and  E for acidic amino acids
  MISC_FEATURE (7)..(7): X is K, R or H for basic amino acids
  MISC_FEATURE (8)..(8): X is C or S
  MISC_FEATURE (9)..(9): X is K, R or H for basic amino acids
  MISC_FEATURE (10)..(10): X is F, W or Y for aromatic amino acids
  MISC_FEATURE (11)..(11): X is C or S
  MISC_FEATURE (12)..(12): X is I, L or V
  MISC_FEATURE (13)..(13): X is K,  R or H for basic amino acids
XXXXXXXXXXXXX

SEQ ID NO: 102 - protein, 21 aa, Artificial
  Completely synthesized peptide construct
MDFWCVEHDRPPPATPTSLTT

SEQ ID NO: 103 - protein, 21 aa, Artificial
  peptide construct
  MISC_FEATURE (1)..(1): X is M or Nle
  MOD_RES (1)..(1): ACETYLATION
  MISC_FEATURE (2)..(2): X is D and E for acidic amino acids
  MISC_FEATURE (3)..(3): X is F, W or Y for aromatic amino acids
  MISC_FEATURE (4)..(4): X is F, W or Y for aromatic amino acids
  MISC_FEATURE (5)..(5): X is C or S
  MISC_FEATURE (6)..(6): X is I, L or V
  MOD_RES (6)..(6): 4Abu
  MISC_FEATURE (7)..(7): X is D and E for acidic amino acids
  MISC_FEATURE (8)..(8): X is K, R or H for basic amino acids
  MISC_FEATURE (9)..(9): X is D and E for acidic amino acids
  MISC_FEATURE (10)..(10): X is K, R or H for basic amino acids
  MISC_FEATURE (11)..(11): X is F or P
  MISC_FEATURE (12)..(12): X is F or P
  MISC_FEATURE (13)..(13): X is F or P
  MISC_FEATURE (14)..(14): X is A or G
  MISC_FEATURE (15)..(15): X is Tor S
  MISC_FEATURE (16)..(16): X is F or P
  MISC_FEATURE (17)..(17): X is T or S
  MISC_FEATURE (18)..(18): X is C or S
  MISC_FEATURE (19)..(19): X is I, L or V
  MISC_FEATURE (20)..(20): X is T or S
  MISC_FEATURE (21)..(21): X is T or S
XXXXXXXXXXXXXXXXXXXXX

SEQ ID NO: 104 - protein, 10 aa, Artificial
  Completely synthesized peptide construct
ERPTLAFLQD

SEQ ID NO: 105 - protein, 10 aa, Artificial
  peptide construct
  MISC_FEATURE (1)..(1): X is D and E for acidic amino acids
  MOD_RES (1)..(1): ACETYLATION
  MISC_FEATURE (2)..(2): X is K, R or H for basic amino acids
  MISC_FEATURE (3)..(3): X is F or P
  MISC_FEATURE (4)..(4): X is T or S
  MISC_FEATURE (5)..(5): X is I, L or V
  MISC_FEATURE (6)..(6): X is A or G
  MISC_FEATURE (7)..(7): X is F, W or Y for aromatic amino acids
  MISC_FEATURE (8)..(8): X is I,  L or V
  MISC_FEATURE (9)..(9): X is N or Q for amidated amino acids
  MISC_FEATURE (10)..(10): X is D and E for acidic amino acids
XXXXXXXXXX

SEQ ID NO: 106 - protein, 10 aa, Artificial
  Completely synthesized peptide construct
DRSTKVIDFH

SEQ ID NO: 107 - protein, 10 aa, Artificial
  peptide construct
  MISC_FEATURE (1)..(1): X is D and E for acidic amino acids
  MOD_RES (1)..(1): ACETYLATION
  MISC_FEATURE (2)..(2): X is K, R or H for basic amino acids
  MISC_FEATURE (3)..(3): X is C  or S
  MISC_FEATURE (4)..(4): X is T or S
  MISC_FEATURE (5)..(5): X is K, R or H for basic amino acids
  MISC_FEATURE (6)..(6): X is I, L or V
  MOD_RES (6)..(6): 4Abu
  MOD_RES (6)..(6): GAMMA-CARBOXYGLUTAMIC ACID HYDROXYLATION
  MISC_FEATURE (7)..(7): X is I, L or V
  MISC_FEATURE (8)..(8): X is  D and E for acidic amino acids
  MISC_FEATURE (9)..(9): X is F, W or Y for aromatic amino acids
  MISC_FEATURE (10)..(10): X is K, R or H for basic amino acids
XXXXXXXXXX

SEQ ID NO: 108 - protein, 13 aa, Artificial
  peptide construct
  MISC_FEATURE (1)..(1): X is I, L or V
  MOD_RES (1)..(1): ACETYLATION
  MISC_FEATURE (2)..(2): X is A or G
  MISC_FEATURE (3)..(3): X is A or G
  MISC_FEATURE (4)..(4): X is F,  W or Y for aromatic amino acids
  MISC_FEATURE (5)..(5): X is K, R or H for basic amino acids
  MISC_FEATURE (6)..(6): X is A or G
  MISC_FEATURE (7)..(7): X is D and E for acidic amino acids
  MISC_FEATURE (8)..(8): X is N or Q for amidated amino acids
  MISC_FEATURE (9)..(9): X is A or G
  MISC_FEATURE (10)..(10): X is F or P
  MISC_FEATURE (11)..(11): X is K, R or H for basic amino acids
  MISC_FEATURE (12)..(12): X is A or G
  MISC_FEATURE (13)..(13): X is D and E for acidic amino acids
XXXXXXXXXXXXX

SEQ ID NO: 109 - protein, 8 aa, Artificial
  peptide construct
  MISC_FEATURE (1)..(1): X is K, R or H for basic amino acids
  MOD_RES (1)..(1): ACETYLATION
  MISC_FEATURE (2)..(2): X is N or Q for amidated amino acids
  MISC_FEATURE (3)..(3): X is I, L or V
  MOD_RES (3)..(3): 4Abu
  MISC_FEATURE (4)..(4): X is I, L or V
  MISC_FEATURE (5)..(5): X is T or S
  MISC_FEATURE (6)..(6): X is  F or P
  MISC_FEATURE (7)..(7): X is K, R or H for basic amino acids
  MISC_FEATURE (8)..(8): X is T or S
XXXXXXXX

SEQ ID NO: 110 - protein, 15 aa, Artificial
  Completely synthesized peptide construct
GDKVSFFCKNKEKKC

SEQ ID NO: 111 - protein, 15 aa, Artificial
  peptide construct
  MISC_FEATURE (1)..(1): X is A or G
  MOD_RES (1)..(1): ACETYLATION
  MISC_FEATURE (2)..(2): X is D and E for acidic amino acids
  MISC_FEATURE (3)..(3): X is K, R or H for basic amino acids
  MISC_FEATURE (4)..(4): X is I, L or V
  MISC_FEATURE (5)..(5): X is C or S
  MISC_FEATURE (6)..(6): X is F, W or Y for aromatic amino acids
  MISC_FEATURE (7)..(7): X is F, W or Y for aromatic amino acids
  MISC_FEATURE (8)..(8): X is C or S
  MISC_FEATURE (9)..(9): X is K, R or H for basic amino acids
  MISC_FEATURE (10)..(10): X is N or Q for amidated amino acids
  MISC_FEATURE (11)..(11): X is K, R or H for basic amino acids
  MISC_FEATURE (12)..(12): X is D and E for acidic amino acids
  MISC_FEATURE (13)..(13): X is K, R or H for basic amino acids
  MISC_FEATURE (14)..(14): X is K, R or H for basic amino acids
  MISC_FEATURE (15)..(15): X is C or S
XXXXXXXXXXXXXXX

SEQ ID NO: 112 - protein, 17 aa, Artificial
  Completely synthesized peptide construct
EIIVTHFPFDEQNCSMK

SEQ ID NO: 113 - protein, 17 aa, Artificial
  peptide construct
  MISC_FEATURE (1)..(1): X is D and E for acidic amino acids
  MOD_RES (1)..(1): ACETYLATION
  MOD_RES (1)..(1): 4Abu
  MOD_RES (1)..(1): 4Abu
  MOD_RES (1)..(1): GAMMA-CARBOXYGLUTAMIC ACID HYDROXYLATION
  MISC_FEATURE (2)..(2): X is I, L or V
  MISC_FEATURE (3)..(3): X is I, L or V
  MISC_FEATURE (4)..(4): X is I, L or V
  MISC_FEATURE (5)..(5): X is T or S
  MISC_FEATURE (6)..(6): X is K, R or H for basic amino acids
  MISC_FEATURE (7)..(7): X is F, W or Y for aromatic amino acids
  MISC_FEATURE (8)..(8): X is F or P
  MISC_FEATURE (9)..(9): X is F, W or Y for aromatic amino acids
  MISC_FEATURE (10)..(10): X is D and E for acidic amino acids
  MOD_RES (10)..(10): 4Abu
  MOD_RES (10)..(10): 4Abu
  MISC_FEATURE (11)..(11): X is D and E for acidic amino acids
  MISC_FEATURE (12)..(12): X is N or Q for amidated amino acids
  MISC_FEATURE (13)..(13): X is N or Q for amidated amino acids
  MISC_FEATURE (14)..(14): X is C or S
  MISC_FEATURE (15)..(15): X is C or S
  MISC_FEATURE (16)..(16): X is M or Nle
  MISC_FEATURE (17)..(17): X is K, R or H for basic amino acids
XXXXXXXXXXXXXXXXX

SEQ ID NO: 114 - protein, 13 aa, Artificial
  peptide construct
  MISC_FEATURE (1)..(1): X is I, L or V
  MOD_RES (1)..(1): ACETYLATION
  MISC_FEATURE (2)..(2): X is K, R or H for basic amino acids
  MISC_FEATURE (3)..(3): X is F, W or Y for aromatic amino acids
  MISC_FEATURE (4)..(4): X is F, W or Y for aromatic amino acids
  MISC_FEATURE (5)..(5): X is K, R or H for basic amino acids
  MISC_FEATURE (6)..(6): X is N or Q for amidated amino acids
  MISC_FEATURE (7)..(7): X is I, L or V
  MOD_RES (7)..(7): 4Abu
  MISC_FEATURE (8)..(8): X is I, L or V
  MISC_FEATURE (9)..(9): X is T or S
  MISC_FEATURE (10)..(10): X is F or P
  MISC_FEATURE (11)..(11): X is K, R or H for basic amino acids
  MISC_FEATURE (12)..(12): X is Tor S
  MISC_FEATURE (13)..(13): X is F or P
XXXXXXXXXXXXX

SEQ ID NO: 115 - protein, 17 aa, Artificial
  peptide construct
  MISC_FEATURE (1)..(1): X is F, W or Y for aromatic amino acids
  MOD_RES (1)..(1): ACETYLATION
  MISC_FEATURE (2)..(2): X is N or Q for amidated amino acids
  MISC_FEATURE (3)..(3): X is N or Q for amidated amino acids
  MISC_FEATURE (4)..(4): X is I, L or V
  MISC_FEATURE (5)..(5): X is N or Q for amidated amino acids
  MISC_FEATURE (6)..(6): X is C or S
  MISC_FEATURE (7)..(7): X is D and E for acidic amino acids
  MISC_FEATURE (8)..(8): X is K, R or H for basic amino acids
  MISC_FEATURE (9)..(9): X is  A or G
  MISC_FEATURE (10)..(10): X is I,  L or V
  MISC_FEATURE (11)..(11): X is F or P
  MISC_FEATURE (12)..(12): X is N or Q for amidated amino acids
  MISC_FEATURE (13)..(13): X is D and E for acidic amino acids
  MISC_FEATURE (14)..(14): X is N or Q for amidated amino acids
  MISC_FEATURE (15)..(15): X is I, L or V
  MOD_RES (15)..(15): 4Abu
  MISC_FEATURE (16)..(16): X is D and E for acidic amino acids
  MISC_FEATURE (17)..(17): X is N or Q for amidated amino acids
XXXXXXXXXXXXXXXXX

SEQ ID NO: 116 - protein, 13 aa, Artificial
  peptide construct
  MISC_FEATURE (1)..(1): X is I, L or V
  MOD_RES (1)..(1): ACETYLATION
  MISC_FEATURE (2)..(2): X is F, W or Y for aromatic amino acids
  MISC_FEATURE (3)..(3): X is I, L or V
  MISC_FEATURE (4)..(4): X is K, R or H for basic amino acids
  MISC_FEATURE (5)..(5): X is K, R or H for basic amino acids
  MISC_FEATURE (6)..(6): X is I, L or V
  MISC_FEATURE (7)..(7): X is C or S
  MISC_FEATURE (8)..(8): X is N or Q for amidated amino acids
  MISC_FEATURE (9)..(9): X is I, L or V
  MOD_RES (9)..(9): 4Abu
  MOD_RES (9)..(9): GAMMA-CARBOXYGLUTAMIC ACID HYDROXYLATION
  MISC_FEATURE (10)..(10): X is I, L or V
  MISC_FEATURE (11)..(11): X is I, L or V
  MISC_FEATURE (12)..(12): X is K, R or H for basic amino acids
  MISC_FEATURE (13)..(13): X is  A or G
XXXXXXXXXXXXX

SEQ ID NO: 117 - protein, 15 aa, Artificial
  peptide construct
  MISC_FEATURE (1)..(1): X is M or Nle
  MOD_RES (1)..(1): ACETYLATION
  MISC_FEATURE (2)..(2): X is K, R or H for basic amino acids
  MISC_FEATURE (3)..(3): X is I, L or V
  MISC_FEATURE (4)..(4): X is T or S
  MISC_FEATURE (5)..(5): X is I, L or V
  MISC_FEATURE (6)..(6): X is A or G
  MISC_FEATURE (7)..(7): X is F, W or Y for aromatic amino acids
  MISC_FEATURE (8)..(8): X is N or Q for amidated amino acids
  MISC_FEATURE (9)..(9): X is N or Q for amidated amino acids
  MISC_FEATURE (10)..(10): X is F, W or Y for aromatic amino acids
  MISC_FEATURE (11)..(11): X is A or G
  MISC_FEATURE (12)..(12): X is F or P
  MISC_FEATURE (13)..(13): X is N or Q for amidated amino acids
  MISC_FEATURE (14)..(14): X is K, R or H for basic amino acids
  MISC_FEATURE (15)..(15): X is K, R or H for basic amino acids
XXXXXXXXXXXXXXX

SEQ ID NO: 118 - protein, 15 aa, Artificial
  peptide construct
  MISC_FEATURE (1)..(1): X is I, L or V
  MOD_RES (1)..(1): ACETYLATION
  MISC_FEATURE (2)..(2): X is A or G
  MISC_FEATURE (3)..(3): X is C or S
  MISC_FEATURE (4)..(4): X is K, R or H for basic amino acids
  MISC_FEATURE (5)..(5): X is K, R or H for basic amino acids
  MISC_FEATURE (6)..(6): X is I, L or V
  MOD_RES (6)..(6): 4Abu
  MISC_FEATURE (7)..(7): X is D and E for acidic amino acids
  MISC_FEATURE (8)..(8): X is A or G
  MISC_FEATURE (9)..(9): X is I, L or V
  MOD_RES (9)..(9): 4Abu
  MISC_FEATURE (10)..(10): X is I, L or V
  MISC_FEATURE (11)..(11): X is A or G
  MISC_FEATURE (12)..(12): X is A or G
  MISC_FEATURE (13)..(13): X is F, W or Y for aromatic amino acids
  MISC_FEATURE (14)..(14): X is N or Q for amidated amino acids
  MISC_FEATURE (15)..(15): X is N or Q for amidated amino acids
XXXXXXXXXXXXXXX

SEQ ID NO: 119 - protein, 19 aa, Artificial
  peptide construct
  MISC_FEATURE (1)..(1): X is I, L or V
  MOD_RES (1)..(1): 4Abu
  MOD_RES (1)..(1): GAMMA-CARBOXYGLUTAMIC ACID HYDROXYLATION
  MOD_RES (1)..(1): ACETYLATION
  MISC_FEATURE (2)..(2): X is D and E for acidic amino acids
  MISC_FEATURE (3)..(3): X is I, L or V
  MISC_FEATURE (4)..(4): X is F, W or Y for aromatic amino acids
  MISC_FEATURE (5)..(5): X is A or G
  MISC_FEATURE (6)..(6): X is C or S
  MISC_FEATURE (7)..(7): X is K, R or H for basic amino acids
  MISC_FEATURE (8)..(8): X is N or Q for amidated amino acids
  MISC_FEATURE (9)..(9): X is F, W or Y for aromatic amino acids
  MISC_FEATURE (10)..(10): X is K, R or H or basic amino acids
  MISC_FEATURE (11)..(11): X is I, L or V
  MISC_FEATURE (12)..(12): X is N or Q for amidated amino acids
  MISC_FEATURE (13)..(13): X is K, R or H for basic amino acids
  MISC_FEATURE (14)..(14): X is N or Q for amidated amino acids
  MISC_FEATURE (15)..(15): X is T or S
  MISC_FEATURE (16)..(16): X is I, L  or V
  MISC_FEATURE (17)..(17): X is A or G
  MISC_FEATURE (18)..(18): X is T or S
  MISC_FEATURE (19)..(19): X is A or G
XXXXXXXXXXXXXXXXXXX

SEQ ID NO: 120 - protein, 25 aa, Artificial
  peptide construct
  MISC_FEATURE (1)..(1): X is A or G
  MOD_RES (1)..(1): ACETYLATION
  MISC_FEATURE (2)..(2): X is I, L or V
  MISC_FEATURE (3)..(3): X is A or G
  MISC_FEATURE (4)..(4): X is A or G
  MISC_FEATURE (5)..(5): X is I, L or V
  MOD_RES (5)..(5): 4Abu
  MISC_FEATURE (6)..(6): X is I, L or V
  MISC_FEATURE (7)..(7): X is K, R or H for basic amino acids
  MISC_FEATURE (8)..(8): X is I, L or V
  MOD_RES (8)..(8): 4Abu
  MISC_FEATURE (9)..(9): X is I, L or V
  MISC_FEATURE (10)..(10): X is T or S
  MISC_FEATURE (11)..(11): X is T or S
  MISC_FEATURE (12)..(12): X is A or G
  MISC_FEATURE (13)..(13): X is F or P
  MISC_FEATURE (14)..(14): X is A or G
  MISC_FEATURE (15)..(15): X is I, L or V
  MOD_RES (15)..(15): 4Abu
  MISC_FEATURE (16)..(16): X is I, L or V
  MISC_FEATURE (17)..(17): X is C or S
  MISC_FEATURE (18)..(18): X is F, W or Y for basic amino acids
  MISC_FEATURE (19)..(19): X is I, L or V
  MISC_FEATURE (20)..(20): X is K, R or H for basic amino acids
  MISC_FEATURE (21)..(21): X is K, R or H for basic amino acids
  MISC_FEATURE (22)..(22): X is K, R or H for basic amino acids
  MISC_FEATURE (23)..(23): X is K, R or H for basic amino acids
  MISC_FEATURE (24)..(24): X is N or Q for amidated amino acids
  MISC_FEATURE (25)..(25): X is N or Q for amidated amino acids
XXXXXXXXXXXXXXXXXXXXXXXXX

SEQ ID NO: 121 - protein, 18 aa, Artificial
  peptide construct
  MISC_FEATURE (1)..(1): X is N or Q for amidated amino acids
  MOD_RES (1)..(1): ACETYLATION
  MISC_FEATURE (2)..(2): X is A or G
  MISC_FEATURE (3)..(3): X is N or Q for amidated amino acids
  MISC_FEATURE (4)..(4): X is D and E for acidic amino acids
  MOD_RES (4)..(4): 4Abu
  MISC_FEATURE (5)..(5): X is D and E for acidic amino acids
  MISC_FEATURE (6)..(6): X is K, R or H for basic amino acids
  MISC_FEATURE (7)..(7): X is A or G
  MISC_FEATURE (8)..(8): X is A or G
  MISC_FEATURE (9)..(9): X is I, L or V
  MOD_RES (9)..(9): 4Abu
  MISC_FEATURE (10)..(10): X is I, L or V
  MISC_FEATURE (11)..(11): X is  C or S
  MISC_FEATURE (12)..(12): X is T or S
  MISC_FEATURE (13)..(13): X is A or G
  MISC_FEATURE (14)..(14): X is I, L or V
  MOD_RES (14)..(14): 4Abu
  MISC_FEATURE (15)..(15): X is I, L or V
  MISC_FEATURE (16)..(16): X is A or G
  MISC_FEATURE (17)..(17): X is A or G
  MISC_FEATURE (18)..(18): X is A or G
XXXXXXXXXXXXXXXXXX

SEQ ID NO: 122 - protein, 18 aa, Artificial
  peptide construct
  MISC_FEATURE (1)..(1): X is D and E for acidic amino acids
  MOD_RES (1)..(1): ACETYLATION
  MISC_FEATURE (2)..(2): X is A or G
  MISC_FEATURE (3)..(3): X is N or Q for amidated amino acids
  MISC_FEATURE (4)..(4): X is D and E for acidic amino acids
  MOD_RES (4)..(4): 4Abu
  MISC_FEATURE (5)..(5): X is D and E for acidic amino acids
  MISC_FEATURE (6)..(6): X is K, R or H for basic amino acids
  MISC_FEATURE (7)..(7): X is A or G
  MISC_FEATURE (8)..(8): X is A or G
  MISC_FEATURE (9)..(9): X is I, L or V
  MOD_RES (9)..(9): 4Abu
  MISC_FEATURE (10)..(10): X is I, L or V
  MISC_FEATURE (11)..(11): X is C or S
  MISC_FEATURE (12)..(12): X is T or S
  MISC_FEATURE (13)..(13): X is A or G
  MISC_FEATURE (14)..(14): X is I, L or V
  MOD_RES (14)..(14): 4Abu
  MISC_FEATURE (15)..(15): X is I, L or V
  MISC_FEATURE (16)..(16): X is A or G
  MISC_FEATURE (17)..(17): X is A or G
  MISC_FEATURE (18)..(18): X is A or G
XXXXXXXXXXXXXXXXXX

SEQ ID NO: 123 - protein, 17 aa, Artificial
  peptide construct
  MISC_FEATURE (1)..(1): X is I, L or V
  MOD_RES (1)..(1): ACETYLATION
  MOD_RES (1)..(1): 4Abu
  MISC_FEATURE (2)..(2): X is I, L or V
  MISC_FEATURE (3)..(3): X is F, W or Y for aromatic amino acids
  MISC_FEATURE (4)..(4): X is K, R or H for basic amino acids
  MISC_FEATURE (5)..(5): X is K, R or H for basic amino acids
  MISC_FEATURE (6)..(6): X is N or Q for amidated amino acids
  MISC_FEATURE (7)..(7): X is K, R or H for basic amino acids
  MISC_FEATURE (8)..(8): X is D and E for acidic amino acids
  MISC_FEATURE (9)..(9): X is K,  R or H for basic amino acids
  MISC_FEATURE (10)..(10): X is I, L or V
  MISC_FEATURE (11)..(11): X is A or G
  MISC_FEATURE (12)..(12): X is D and E for acidic amino acids
  MOD_RES (12)..(12): GAMMA-CARBOXYGLUTAMIC ACID HYDROXYLATION
  MISC_FEATURE (13)..(13): X is I, L or V
  MISC_FEATURE (14)..(14): X is D and E for acidic amino acids
  MISC_FEATURE (15)..(15): X is N or Q for amidated amino acids
  MISC_FEATURE (16)..(16): X is C or S
  MISC_FEATURE (17)..(17): X is D and E for acidic amino acids
XXXXXXXXXXXXXXXXX

SEQ ID NO: 124 - protein, 13 aa, Artificial
  peptide construct
  MISC_FEATURE (1)..(1): X is D and E for acidic amino acids
  MOD_RES (1)..(1): ACETYLATION
  MOD_RES (1)..(1): 4Abu
  MOD_RES (1)..(1): GAMMA-CARBOXYGLUTAMIC ACID HYDROXYLATION
  MISC_FEATURE (2)..(2): X is I, L or V
  MISC_FEATURE (3)..(3): X is I, L or V
  MISC_FEATURE (4)..(4): X is K, R or H for basic amino acids
  MISC_FEATURE (5)..(5): X is N or Q for amidated amino acids
  MISC_FEATURE (6)..(6): X is A or G
  MISC_FEATURE (7)..(7): X is D and E for acidic amino acids
  MISC_FEATURE (8)..(8): X is K, R or H for basic amino acids
  MISC_FEATURE (9)..(9): X is I, L or V
  MOD_RES (9)..(9): 4Abu
  MISC_FEATURE (10)..(10): X is D and E for acidic amino acids
  MISC_FEATURE (11)..(11): X is K, R or H for basic amino acids
  MISC_FEATURE (12)..(12): X is I, L or V
  MOD_RES (12)..(12): 4Abu
  MISC_FEATURE (13)..(13): X is D and E for acidic amino acids
XXXXXXXXXXXXX

SEQ ID NO: 125 - protein, 11 aa, Artificial
  peptide construct
  MISC_FEATURE (1)..(1): X is F or P
  MOD_RES (1)..(1): ACETYLATION
  MISC_FEATURE (2)..(2): X is C or S
  MISC_FEATURE (3)..(3): X is T or S
  MISC_FEATURE (4)..(4): X is K, R or H for basic amino acids
  MISC_FEATURE (5)..(5): X is I, L or V
  MOD_RES (5)..(5): 4Abu
  MOD_RES (5)..(5): GAMMA-CARBOXYGLUTAMIC ACID HYDROXYLATION
  MISC_FEATURE (6)..(6): X is I, L or V
  MISC_FEATURE (7)..(7): X is I, L or V
  MISC_FEATURE (8)..(8): X is T or S
  MISC_FEATURE (9)..(9): X is K, R or H for basic amino acids
  MISC_FEATURE (10)..(10): X is T or S
  MISC_FEATURE (11)..(11): X is I, L or V
XXXXXXXXXXX

SEQ ID NO: 126 - protein, 15 aa, Artificial
  Completely synthesized peptide construct
DFLPHYKNTSLGHRP

SEQ ID NO: 127 - protein, 15 aa, Artificial
  peptide construct
  MISC_FEATURE (1)..(1): X is D and E for acidic amino acids
  MOD_RES (1)..(1): ACETYLATION
  MISC_FEATURE (2)..(2): X is F, W or Y for aromatic amino acids
  MISC_FEATURE (3)..(3): X is I, L or V
  MISC_FEATURE (4)..(4): X is F or P
  MISC_FEATURE (5)..(5): X is K, R or H for basic amino acids
  MISC_FEATURE (6)..(6): X is F, W or Y for aromatic amino acids
  MISC_FEATURE (7)..(7): X is K, R or H for basic amino acids
  MISC_FEATURE (8)..(8): X is N or Q for amidated amino acids
  MISC_FEATURE (9)..(9): X is T or S
  MISC_FEATURE (10)..(10): X is  C or S
  MISC_FEATURE (11)..(11): X is I, L or V
  MISC_FEATURE (12)..(12): X is A  or G
  MISC_FEATURE (13)..(13): X is K, R or H for basic amino acids
  MISC_FEATURE (14)..(14): X is K, R or H for basic amino acids
  MISC_FEATURE (15)..(15): X is F or P
XXXXXXXXXXXXXXX

SEQ ID NO: 128 - protein, 9 aa, Artificial
  peptide construct
  MISC_FEATURE (1)..(1): X is A or G
  MOD_RES (1)..(1): ACETYLATION
  MISC_FEATURE (2)..(2): X is F, W or Y for aromatic amino acids
  MISC_FEATURE (3)..(3): X is M or Nle
  MISC_FEATURE (4)..(4): X is T or S
  MISC_FEATURE (5)..(5): X is M or Nle
  MISC_FEATURE (6)..(6): X is K, R or H for basic amino acids
  MISC_FEATURE (7)..(7): X is I, L or V
  MISC_FEATURE (8)..(8): X is K, R or H for basic amino acids
  MISC_FEATURE (9)..(9): X is N or Q for amidated amino acids
XXXXXXXXX

SEQ ID NO: 129 - protein, 31 aa, Artificial; identical to SEQ ID NO: 28
  Completely synthesized peptide construct

SEQ ID NO: 130 - protein, 31 aa, Artificial
  peptide construct
  MISC_FEATURE (1)..(1): X is D and E for acidic amino acids
  MOD_RES (1)..(1): ACETYLATION
  MISC_FEATURE (2)..(2): X is N or Q for amidated amino acids
  MISC_FEATURE (3)..(3): X is N or Q for amidated amino acids
  MISC_FEATURE (4)..(4): X is I, L or V
  MOD_RES (4)..(4): 4Abu
  MOD_RES (4)..(4): GAMMA-CARBOXYGLUTAMIC ACID HYDROXYLATION
  MISC_FEATURE (5)..(5): X is I, L or V
  MISC_FEATURE (6)..(6): X is D and E for acidic amino acids
  MISC_FEATURE (7)..(7): X is T or S
  MISC_FEATURE (8)..(8): X is C or S
  MISC_FEATURE (9)..(9): X is K, R or H for basic amino acids
  MISC_FEATURE (10)..(10): X is N or Q for amidated amino acids
  MISC_FEATURE (11)..(11): X is  D and E for acidic amino acids
  MISC_FEATURE (12)..(12): X is K, R or H for basic amino acids
  MISC_FEATURE (13)..(13): X is I, L or V
  MISC_FEATURE (14)..(14): X is K, R or H for basic amino acids
  MISC_FEATURE (15)..(15): X is N or Q for amidated amino acids
  MISC_FEATURE (16)..(16): X is K, R or H for basic amino acids
  MISC_FEATURE (17)..(17): X is K, R or H for basic amino acids
  MISC_FEATURE (18)..(18): X is  A or G
  MISC_FEATURE (19)..(19): X is N or Q for amidated amino acids
  MISC_FEATURE (20)..(20): X is A or G
  MISC_FEATURE (21)..(21): X is C or S
  MISC_FEATURE (22)..(22): X is C or S
  MISC_FEATURE (23)..(23): X is T or S
  MISC_FEATURE (24)..(24): X is K, R or H for basic amino acids
  MISC_FEATURE (25)..(25): X is F, W or Y for aromatic amino acids
  MISC_FEATURE (26)..(26): X is D and E for acidic amino acids
  MISC_FEATURE (27)..(27): X is A or G
  MISC_FEATURE (28)..(28): X is N or Q for amidated amino acids
  MISC_FEATURE (29)..(29): X is I,  L or V
  MISC_FEATURE (30)..(30): X is F or P
  MISC_FEATURE (31)..(31): X is C or S
XXXXXXXXXXXXXXXXXXXXXXXXXXXXXXX

SEQ ID NO: 131 - protein, 10 aa, Artificial
  peptide construct
  MISC_FEATURE (1)..(1): X is D and E for acidic amino acids
  MOD_RES (1)..(1): ACETYLATION
  MISC_FEATURE (2)..(2): X is N or Q for amidated amino acids
  MISC_FEATURE (3)..(3): X is T or S
  MISC_FEATURE (4)..(4): X is N or Q for amidated amino acids
  MISC_FEATURE (5)..(5): X is D and E for acidic amino acids
  MISC_FEATURE (6)..(6): X is T or S
  MISC_FEATURE (7)..(7): X is D and E for acidic amino acids
  MISC_FEATURE (8)..(8): X is A or G
  MISC_FEATURE (9)..(9): X is A or G
  MISC_FEATURE (10)..(10): X is C or S
XXXXXXXXXX

SEQ ID NO: 132 - protein, 9 aa, Artificial
  peptide construct
  MISC_FEATURE (1)..(1): X is I, L or V
  MOD_RES (1)..(1): ACETYLATION
  MISC_FEATURE (2)..(2): X is N or Q for amidated amino acids
  MISC_FEATURE (3)..(3): X is A or G
  MISC_FEATURE (4)..(4): X is D and E for acidic amino acids
  MOD_RES (4)..(4): 4Abu
  MISC_FEATURE (5)..(5): X is D and E for acidic amino acids
  MISC_FEATURE (6)..(6): X is C or S
  MISC_FEATURE (7)..(7): X is N or Q for amidated amino acids
  MISC_FEATURE (8)..(8): X is D and E for acidic amino acids
  MISC_FEATURE (9)..(9): X is K, R or H for basic amino acids
XXXXXXXXX

SEQ ID NO: 133 - protein, 16 aa, Artificial
  peptide construct
  MISC_FEATURE (1)..(1): X is D and E for acidic amino acids
  MOD_RES (1)..(1): ACETYLATION
  MOD_RES (1)..(1): 4Abu
  MOD_RES (1)..(1): GAMMA-CARBOXYGLUTAMIC ACID HYDROXYLATION
  MISC_FEATURE (2)..(2): X is I, L or V
  MISC_FEATURE (3)..(3): X is I, L or V
  MISC_FEATURE (4)..(4): X is K, R or H for basic amino acids
  MISC_FEATURE (5)..(5): X is N or Q for amidated amino acids
  MISC_FEATURE (6)..(6): X is A or G
  MISC_FEATURE (7)..(7): X is D and E for acidic amino acids
  MISC_FEATURE (8)..(8): X is K, R or H for basic amino acids
  MISC_FEATURE (9)..(9): X is I, L or V
  MOD_RES (9)..(9): 4Abu
  MISC_FEATURE (10)..(10): X is D and E for acidic amino acids
  MISC_FEATURE (11)..(11): X is K, R or H for basic amino acids
  MISC_FEATURE (12)..(12): X is I, L or V
  MOD_RES (12)..(12): 4Abu
  MISC_FEATURE (13)..(13): X is D and E for acidic amino acids
  MISC_FEATURE (14)..(14): X is A or G
  MISC_FEATURE (15)..(15): X is A or G
  MISC_FEATURE (16)..(16): X is A or G
XXXXXXXXXXXXXXXX

SEQ ID NO: 134 - protein, 4 aa, Artificial
  peptide construct
  MISC_FEATURE (1)..(1): X is A or G
  MOD_RES (1)..(1): ACETYLATION
  MISC_FEATURE (2)..(2): X is A or G
  MISC_FEATURE (3)..(3): X is A or G
  MISC_FEATURE (4)..(4): X is C or S
XXXX

SEQ ID NO: 135 - protein, 5 aa, Artificial
  peptide construct
  MISC_FEATURE (1)..(1): X is A or G
  MOD_RES (1)..(1): ACETYLATION
  MISC_FEATURE (2)..(2): X is A or G
  MISC_FEATURE (3)..(3): X is A or G
  MISC_FEATURE (4)..(4): X is C or S
  MISC_FEATURE (5)..(5): X is C or S
XXXXX

SEQ ID NO: 136 - protein, 5 aa, Artificial
  peptide construct
  MISC_FEATURE (1)..(1): X is A or G
  MOD_RES (1)..(1): ACETYLATION
  MISC_FEATURE (2)..(2): X is A or G
  MISC_FEATURE (3)..(3): X is A or G
  MISC_FEATURE (4)..(4): X is A or G
  MISC_FEATURE (5)..(5): X is C or S
XXXXX

SEQ ID NO: 137 - protein, 5 aa, Artificial
  peptide construct
  MISC_FEATURE (1)..(1): X is A or G
  MOD_RES (1)..(1): ACETYLATION
  MISC_FEATURE (2)..(2): X is A or G
  MISC_FEATURE (3)..(3): X is A or G
  MISC_FEATURE (4)..(4): X is A or G
  MISC_FEATURE (5)..(5): X is C or S
XXXXX

SEQ ID NO: 138 - protein, 8 aa, Artificial
  peptide construct
  MISC_FEATURE (1)..(1): X is A or G
  MOD_RES (1)..(1): ACETYLATION
  MISC_FEATURE (2)..(2): X is A or G
  MISC_FEATURE (3)..(3): X is A or G
  MISC_FEATURE (4)..(4): X is C or S
  MISC_FEATURE (5)..(5): X is A or G
  MISC_FEATURE (6)..(6): X is A or G
  MISC_FEATURE (7)..(7): X is A or G
  MISC_FEATURE (8)..(8): X is C or S
XXXXXXXX

SEQ ID NO: 139 - protein, 8 aa, Artificial
  peptide construct
  MISC_FEATURE (1)..(1): X is I, L or V
  MOD_RES (1)..(1): ACETYLATION
  MISC_FEATURE (2)..(2): X is K, R or H for basic amino acids
  MISC_FEATURE (3)..(3): X is A or G
  MISC_FEATURE (4)..(4): X is A or G
  MISC_FEATURE (5)..(5): X is A or G
  MISC_FEATURE (6)..(6): X is A or G
  MISC_FEATURE (7)..(7): X is C or S
  MISC_FEATURE (8)..(8): X is C or S
XXXXXXXX

SEQ ID NO: 140 - protein, 12 aa, Artificial
  peptide construct
  MISC_FEATURE (1)..(1): X is A or G
  MOD_RES (1)..(1): ACETYLATION
  MISC_FEATURE (2)..(2): X is A or G
  MISC_FEATURE (3)..(3): X is A or G
  MISC_FEATURE (4)..(4): X is C or S
  MISC_FEATURE (5)..(5): X is A or G
  MISC_FEATURE (6)..(6): X is T or S
  MISC_FEATURE (7)..(7): X is A or G
  MISC_FEATURE (8)..(8): X is C or S
  MISC_FEATURE (9)..(9): X is A or G
  MISC_FEATURE (10)..(10): X is C or S
  MISC_FEATURE (11)..(11): X is A or G
  MISC_FEATURE (12)..(12): X is C or S
XXXXXXXXXXXX

SEQ ID NO: 141 - protein, 58 aa, Artificial
  Completely synthesized peptide construct
DGQEEKAGVVSTGLIGGGDAEFRHDSGYEVHHQKLVFFAEDVGSNKGAIIGLMVGGVV

SEQ ID NO: 142 - protein, 58 aa, Artificial
  peptide construct
  MISC_FEATURE (1)..(1): X is D and E for acidic amino acids
  MISC_FEATURE (2)..(2): X is A or G
  MISC_FEATURE (3)..(3): X is N or Q for amidated amino acids
  MISC_FEATURE (4)..(4): X is D and E for acidic amino acids
  MISC_FEATURE (5)..(5): X is D and E for acidic amino acids
  MISC_FEATURE (6)..(6): X is K, R or H for basic amino acids
  MISC_FEATURE (7)..(7): X is A or G
  MISC_FEATURE (8)..(8): X is A or G
  MISC_FEATURE (9)..(9): X is I, L or V
  MISC_FEATURE (10)..(10): X is I, L or V
  MISC_FEATURE (11)..(11): X is C or S
  MISC_FEATURE (12)..(12): X is T or S
  MISC_FEATURE (13)..(13): X is A or G
  MISC_FEATURE (14)..(14): X is I, L or V
  MISC_FEATURE (15)..(15): X is I, L or V
  MISC_FEATURE (16)..(16): X is A or G
  MISC_FEATURE (17)..(17): X is A or G
  MISC_FEATURE (18)..(18): X is A or G
  MISC_FEATURE (19)..(19): X is D and E for acidic amino acids
  MISC_FEATURE (20)..(20): X is A or G
  MISC_FEATURE (21)..(21): X is D and E for acidic amino acids
  MISC_FEATURE (22)..(22): X is F, W or Y for aromatic amino acids
  MISC_FEATURE (23)..(23): X is K, R or H for basic amino acids
  MISC_FEATURE (24)..(24): X is K, R or H for basic amino acids
  MISC_FEATURE (25)..(25): X is D and E for acidic amino acids
  MISC_FEATURE (26)..(26): X is T or S
  MISC_FEATURE (27)..(27): X is A or G
  MISC_FEATURE (28)..(28): X is F, W or Y for aromatic amino acids
  MISC_FEATURE (29)..(29): X is D and E for acidic amino acids
  MISC_FEATURE (30)..(30): X is I, L or V
  MISC_FEATURE (31)..(31): X is K, R or H for basic amino acids
  MISC_FEATURE (32)..(32): X is K, R or H for basic amino acids
  MISC_FEATURE (33)..(33): X is N or Q for amidated amino acids
  MISC_FEATURE (34)..(34): X is K, R or H for basic amino acids
  MISC_FEATURE (35)..(35): X is I, L  or V
  MISC_FEATURE (36)..(36): X is I, L  or V
  MISC_FEATURE (37)..(37): X is F, W or Y for aromatic amino acids
  MISC_FEATURE (38)..(38): X is F, W or Y for aromatic amino acids
  MISC_FEATURE (39)..(39): X is A or G
  MISC_FEATURE (40)..(40): X is D and E for acidic amino acids
  MISC_FEATURE (41)..(41): X is D and E for acidic amino acids
  MISC_FEATURE (42)..(42): X is I, L or V
  MISC_FEATURE (43)..(43): X is A or G
  MISC_FEATURE (44)..(44): X is C or S
  MISC_FEATURE (45)..(45): X is N or Q for amidated amino acids
  MISC_FEATURE (46)..(46): X is K, R or H for basic amino acids
  MISC_FEATURE (47)..(47): X is A or G
  MISC_FEATURE (48)..(48): X is A or G
  MISC_FEATURE (49)..(49): X is I, L or V
  MISC_FEATURE (50)..(50): X is I, L or V
  MISC_FEATURE (51)..(51): X is A or G
  MISC_FEATURE (52)..(52): X is I, L or V
  MISC_FEATURE (53)..(53): X is M or Nle
  MISC_FEATURE (54)..(54): X is I, L or V
  MISC_FEATURE (55)..(55): X is A or G
  MISC_FEATURE (56)..(56): X is A or G
  MISC_FEATURE (57)..(57): X is I, L or V
  MISC_FEATURE (58)..(58): X is I, L or V
XXXXXXXXXXXXXXXXXXXXXXXXXXXXXXXXXXXXXXXXXXXXXXXXXXXXXXXXXX

SEQ ID NO: 143 - protein, 46 aa, Artificial
  Completely synthesized peptide construct
DGQEEKAGVVSTGLIGGGDAEFRHDSGYEVHHQKLVFFAENVGSNK

SEQ ID NO: 144 - protein, 46 aa, Artificial
  peptide construct
  MISC_FEATURE (1)..(1): X is D and E for acidic amino acids
  MISC_FEATURE (2)..(2): X is A or G
  MISC_FEATURE (3)..(3): X is N or Q for amidated amino acids
  MISC_FEATURE (4)..(4): X is D and E for acidic amino acids
  MISC_FEATURE (5)..(5): X is D and E for acidic amino acids
  MISC_FEATURE (6)..(6): X is K, R or H for basic amino acids
  MISC_FEATURE (7)..(7): X is A or G
  MISC_FEATURE (8)..(8): X is A or G
  MISC_FEATURE (9)..(9): X is I, L or V
  MISC_FEATURE (10)..(10): X is I, L or V
  MISC_FEATURE (11)..(11): X is C or S
  MISC_FEATURE (12)..(12): X is T or S
  MISC_FEATURE (13)..(13): X is A or G
  MISC_FEATURE (14)..(14): X is I, L or V
  MISC_FEATURE (15)..(15): X is I, L or V
  MISC_FEATURE (16)..(16): X is A or G
  MISC_FEATURE (17)..(17): X is A or G
  MISC_FEATURE (18)..(18): X is A or G
  MISC_FEATURE (19)..(19): X is D and E for acidic amino acids
  MISC_FEATURE (20)..(20): X is A or G
  MISC_FEATURE (21)..(21): X is D and E for acidic amino acids
  MISC_FEATURE (22)..(22): X is F, W or Y for aromatic amino acids
  MISC_FEATURE (23)..(23): X is K, R or H for basic amino acids
  MISC_FEATURE (24)..(24): X is K, R or H for basic amino acids
  MISC_FEATURE (25)..(25): X is D and E for basic amino acids
  MISC_FEATURE (26)..(26): X is T or S
  MISC_FEATURE (27)..(27): X is A or G
  MISC_FEATURE (28)..(28): X is F, W or Y for aromatic amino acids
  MISC_FEATURE (29)..(29): X is D and E for acidic amino acids
  MISC_FEATURE (30)..(30): X is I, L or V
  MISC_FEATURE (31)..(31): X is K, R or H for basic amino acids
  MISC_FEATURE (32)..(32): X is K, R or H for basic amino acids
  MISC_FEATURE (33)..(33): X is N or Q for amidated amino acids
  MISC_FEATURE (34)..(34): X is K, R or H for basic amino acids
  MISC_FEATURE (35)..(35): X is I, L or V
  MISC_FEATURE (36)..(36): X is I, L or V
  MISC_FEATURE (37)..(37): X is F, W or Y for aromatic amino acids
  MISC_FEATURE (38)..(38): X is F, W or Y for aromatic amino acids
  MISC_FEATURE (39)..(39): X is A or G
  MISC_FEATURE (40)..(40): X is D and E for acidic amino acids
  MISC_FEATURE (41)..(41): X is D and E for acidic amino acids
  MISC_FEATURE (42)..(42): X is I, L or V
  MISC_FEATURE (43)..(43): X is A or G
  MISC_FEATURE (44)..(44): X is C or S
  MISC_FEATURE (45)..(45): X is N or Q for amidated amino acids
  MISC_FEATURE (46)..(46): X is K, R or H for basic amino acids
XXXXXXXXXXXXXXXXXXXXXXXXXXXXXXXXXXXXXXXXXXXXXX

SEQ ID NO: 145 - protein, 48 aa, Artificial
  Completely synthesized peptide construct
DGQEEKAGVVSTGLIGGGDAEFRHDSGYEVHHQKLVFFAENVGSNKAI

SEQ ID NO: 146 - protein, 48 aa, Artificial
  peptide construct
  MISC_FEATURE (1)..(1): X is D and E for acidic amino acids
  MISC_FEATURE (2)..(2): X is A or G
  MISC_FEATURE (3)..(3): X is N or Q for amidated amino acids
  MISC_FEATURE (4)..(4): X is D and E for acidic amino acids
  MISC_FEATURE (5)..(5): X is D and E for acidic amino acids
  MISC_FEATURE (6)..(6): X is K, R or H for basic amino acids
  MISC_FEATURE (7)..(7): X is A or G
  MISC_FEATURE (8)..(8): X is A or G
  MISC_FEATURE (9)..(9): X is I, L or V
  MISC_FEATURE (10)..(10): X is I, L or V
  MISC_FEATURE (11)..(11): X is C or S
  MISC_FEATURE (12)..(12): X is T or S
  MISC_FEATURE (13)..(13): X is A or G
  MISC_FEATURE (14)..(14): X is I, L or V
  MISC_FEATURE (15)..(15): X is I, L or V
  MISC_FEATURE (16)..(16): X is A or G
  MISC_FEATURE (17)..(17): X is A or G
  MISC_FEATURE (18)..(18): X is A or G
  MISC_FEATURE (19)..(19): X is D and E for acidic amino acids
  MISC_FEATURE (20)..(20): X is A or G
  MISC_FEATURE (21)..(21): X is D and E for acidic amino acids
  MISC_FEATURE (22)..(22): X is F, W or Y for aromatic amino acids
  MISC_FEATURE (23)..(23): X is K, R or H for basic amino acids
  MISC_FEATURE (24)..(24): X is K, R or H for basic amino acids
  MISC_FEATURE (25)..(25): X is D and E for acidic amino acids
  MISC_FEATURE (26)..(26): X is T or S
  MISC_FEATURE (27)..(27): X is A or G
  MISC_FEATURE (28)..(28): X is F, W or Y for aromatic amino acids
  MISC_FEATURE (29)..(29): X is D and E for acidic amino acids
  MISC_FEATURE (30)..(30): X is I, L or V
  MISC_FEATURE (31)..(31): X is K, R or H for basic amino acids
  MISC_FEATURE (32)..(32): X is K, R or H for basic amino acids
  MISC_FEATURE (33)..(33): X is N or Q for amidated amino acids
  MISC_FEATURE (34)..(34): X is K, R or H for basic amino acids
  MISC_FEATURE (35)..(35): X is I, L or V
  MISC_FEATURE (36)..(36): X is I, L or V
  MISC_FEATURE (37)..(37): X is F, W or Y for aromatic amino acids
  MISC_FEATURE (38)..(38): X is F, W or Y for aromatic amino acids
  MISC_FEATURE (39)..(39): X is A or G
  MISC_FEATURE (40)..(40): X is Dand E for acidic amino acids
  MISC_FEATURE (41)..(41): X is Dand E for acidic amino acids
  MISC_FEATURE (42)..(42): X is I, L or V
  MISC_FEATURE (43)..(43): X is A or G
  MISC_FEATURE (44)..(44): X is C or S
  MISC_FEATURE (45)..(45): X is N or Q for amidated amino acids
  MISC_FEATURE (46)..(46): X is K, R or H for basic amino acids
  MISC_FEATURE (47)..(47): X is A or G
  MISC_FEATURE (48)..(48): X is I, L or V
XXXXXXXXXXXXXXXXXXXXXXXXXXXXXXXXXXXXXXXXXXXXXXXX

SEQ ID NO: 147 - protein, 29 aa, Artificial
  Completely synthesized peptide construct
DGQEEKAGVVSTGLIGGGDAEFRHDSGYE

SEQ ID NO: 148 - protein, 29 aa, Artificial
  peptide construct
  MISC_FEATURE (1)..(1): X is D and E for acidic amino acids
  MISC_FEATURE (2)..(2): X is A or G
  MISC_FEATURE (3)..(3): X is N or Q for amidated amino acids
  MISC_FEATURE (4)..(4): X is D and E for acidic amino acids
  MISC_FEATURE (5)..(5): X is D and E for acidic amino acids
  MISC_FEATURE (6)..(6): X is K, R or H for basic amino acids
  MISC_FEATURE (7)..(7): X is A or G
  MISC_FEATURE (8)..(8): X is A or G
  MISC_FEATURE (9)..(9): X is I, L or V
  MISC_FEATURE (10)..(10): X is I, L or V
  MISC_FEATURE (11)..(11): X is C or S
  MISC_FEATURE (12)..(12): X is T or S
  MISC_FEATURE (13)..(13): X is A or G
  MISC_FEATURE (14)..(14): X is I, L or V
  MISC_FEATURE (15)..(15): X is I, L or V
  MISC_FEATURE (16)..(16): X is A or G
  MISC_FEATURE (17)..(17): X is A or G
  MISC_FEATURE (18)..(18): X is A or G
  MISC_FEATURE (19)..(19): X is D and E for acidic amino acids
  MISC_FEATURE (20)..(20): X is A or G
  MISC_FEATURE (21)..(21): X is D and E for acidic amino acids
  MISC_FEATURE (22)..(22): X is F, W or Y for aromatic amino acids
  MISC_FEATURE (23)..(23): X is K, R or H for basic amino acids
  MISC_FEATURE (24)..(24): X is K, R or H for basic amino acids
  MISC_FEATURE (25)..(25): X is D and E for acidic amino acids
  MISC_FEATURE (26)..(26): X is  T or S
  MISC_FEATURE (27)..(27): X is A or G
  MISC_FEATURE (28)..(28): X is F, W or Y for aromatic amino acids
  MISC_FEATURE (29)..(29): X is D and E for acidic amino acids
XXXXXXXXXXXXXXXXXXXXXXXXXXXXX

SEQ ID NO: 149 - protein, 25 aa, Artificial
  Completely synthesized peptide construct
DGQEEKAGVVSTGLIGGGENVGSNK

SEQ ID NO: 150 - protein, 25 aa, Artificial
  peptide construct
  MISC_FEATURE (1)..(1): X is D and E for acidic amino acids
  MISC_FEATURE (2)..(2): X is A or G
  MISC_FEATURE (3)..(3): X is N or Q for amidated amino acids
  MISC_FEATURE (4)..(4): X is D and E for acidic amino acids
  MISC_FEATURE (5)..(5): X is D and E for acidic amino acids
  MISC_FEATURE (6)..(6): X is K, R or H for basic amino acids
  MISC_FEATURE (7)..(7): X is A or G
  MISC_FEATURE (8)..(8): X is A or G
  MISC_FEATURE (9)..(9): X is I, L or V
  MISC_FEATURE (10)..(10): X is I, L or V
  MISC_FEATURE (11)..(11): X is C or S
  MISC_FEATURE (12)..(12): X is T or S
  MISC_FEATURE (13)..(13): X is A or G
  MISC_FEATURE (14)..(14): X is I, L or V
  MISC_FEATURE (15)..(15): X is I, L or V
  MISC_FEATURE (16)..(16): X is A or G
  MISC_FEATURE (17)..(17): X is A or G
  MISC_FEATURE (18)..(18): X is A or G
  MISC_FEATURE (19)..(19): X is D and E for acidic amino acids
  MISC_FEATURE (20)..(20): X is D and E for acidic amino acids
  MISC_FEATURE (21)..(21): X is I, L or V
  MISC_FEATURE (22)..(22): X is A or G
  MISC_FEATURE (23)..(23): X is C or S
  MISC_FEATURE (24)..(24): X is N or Q for amidated amino acids
  MISC_FEATURE (25)..(25): X is K, R or H for basic amino acids
XXXXXXXXXXXXXXXXXXXXXXXXX

SEQ ID NO: 151 - protein, 30 aa, Artificial
  Completely synthesized peptide construct
DGQEEKAGVVSTGLIGGGDAEFRHDSGYEV

SEQ ID NO: 152 - protein, 30 aa, Artificial; identical to SEQ ID NO: 58
  peptide construct
  MISC_FEATURE (1)..(1): X is D and E for acidic amino acids
  MISC_FEATURE (2)..(2): X is A or G
  MISC_FEATURE (3)..(3): X is N or Q for amidated amino acids
  MISC_FEATURE (4)..(4): X is D and E for acidic amino acids
  MISC_FEATURE (5)..(5): X is D and E for acidic amino acids
  MISC_FEATURE (6)..(6): X is K, R or H for basic amino acids
  MISC_FEATURE (7)..(7): X is A or G
  MISC_FEATURE (8)..(8): X is A or G
  MISC_FEATURE (9)..(9): X is I, L or V
  MISC_FEATURE (10)..(10): X is I, L or V
  MISC_FEATURE (11)..(11): X is C or S
  MISC_FEATURE (12)..(12): X is T or S
  MISC_FEATURE (13)..(13): X is A or G
  MISC_FEATURE (14)..(14): X is I, L or V
  MISC_FEATURE (15)..(15): X is I, L or V
  MISC_FEATURE (16)..(16): X is A or G
  MISC_FEATURE (17)..(17): X is A or G
  MISC_FEATURE (18)..(18): X is A or G
  MISC_FEATURE (19)..(19): X is D and E for acidic amino acids
  MISC_FEATURE (20)..(20): X is A or G
  MISC_FEATURE (21)..(21): X is D and E for acidic amino acids
  MISC_FEATURE (22)..(22): X is F, W or Y for aromatic amino acids
  MISC_FEATURE (23)..(23): X is K, R or H for basic amino acids
  MISC_FEATURE (24)..(24): X is K, R or H for basic amino acids
  MISC_FEATURE (25)..(25): X is D and E for acidic amino acids
  MISC_FEATURE (26)..(26): X is T or S
  MISC_FEATURE (27)..(27): X is A or G
  MISC_FEATURE (28)..(28): X is F, W or Y for aromatic amino acids
  MISC_FEATURE (29)..(29): X is D and E for acidic amino acids
  MISC_FEATURE (30)..(30): X is I, L or V

SEQ ID NO: 153 - protein, 28 aa, Artificial
  Completely synthesized peptide construct
DGQEEKAGVVSTGLIGGGDAEFRHDSGY

SEQ ID NO: 154 - protein, 28 aa, Artificial
  peptide construct
  MISC_FEATURE (1)..(1): X is D and E for acidic amino acids
  MISC_FEATURE (2)..(2): X is A or G
  MISC_FEATURE (3)..(3): X is N or Q for amidated amino acids
  MISC_FEATURE (4)..(4): X is D and E for amidated amino acids
  MISC_FEATURE (5)..(5): X is D and E for amidated amino acids
  MISC_FEATURE (6)..(6): X is K, R or H for basic amino acids
  MISC_FEATURE (7)..(7): X is A or G
  MISC_FEATURE (8)..(8): X is A or G
  MISC_FEATURE (9)..(9): X is I, L or V
  MISC_FEATURE (10)..(10): X is I, L or V
  MISC_FEATURE (11)..(11): X is C or S
  MISC_FEATURE (12)..(12): X is T or S
  MISC_FEATURE (13)..(13): X is A or G
  MISC_FEATURE (14)..(14): X is I, L or V
  MISC_FEATURE (15)..(15): X is I, L or V
  MISC_FEATURE (16)..(16): X is A or G
  MISC_FEATURE (17)..(17): X is A or G
  MISC_FEATURE (18)..(18): X is A or G
  MISC_FEATURE (19)..(19): X is D and E for acidic amino acids
  MISC_FEATURE (20)..(20): X is A or G
  MISC_FEATURE (21)..(21): X is D and E for acidic amino acids
  MISC_FEATURE (22)..(22): X is F, W or Y for aromatic amino acids
  MISC_FEATURE (23)..(23): X is K, R or H for basic amino acids
  MISC_FEATURE (24)..(24): X is K, R or H for basic amino acids
  MISC_FEATURE (25)..(25): X is D and E for acidic amino acids
  MISC_FEATURE (26)..(26): X is T or S
  MISC_FEATURE (27)..(27): X is A or G
  MISC_FEATURE (28)..(28): X is F, W or Y for aromatic amino acids
XXXXXXXXXXXXXXXXXXXXXXXXXXXX

SEQ ID NO: 155 - protein, 22 aa, Artificial
  Completely synthesized peptide construct
DGQEEKAGVVSTGLIGGGEFRH

SEQ ID NO: 156 - protein, 22 aa, Artificial
  peptide construct
  MISC_FEATURE (1)..(1): X is D and E for acidic amino acids
  MISC_FEATURE (2)..(2): X is  A or G
  MISC_FEATURE (3)..(3): X is N or Q for aromatic amino acids
  MISC_FEATURE (4)..(4): X is D and E for acidic amino acids
  MISC_FEATURE (5)..(5): X is D and E for acidic amino acids
  MISC_FEATURE (6)..(6): X is K, R or H for basic amino acids
  MISC_FEATURE (7)..(7): X is A or G
  MISC_FEATURE (8)..(8): X is A or G
  MISC_FEATURE (9)..(9): X is I, L or V
  MISC_FEATURE (10)..(10): X is I, L or V
  MISC_FEATURE (11)..(11): X is C or S
  MISC_FEATURE (12)..(12): X is T or S
  MISC_FEATURE (13)..(13): X is A or G
  MISC_FEATURE (14)..(14): X is I, L or V
  MISC_FEATURE (15)..(15): X is I, L or V
  MISC_FEATURE (16)..(16): X is A or G
  MISC_FEATURE (17)..(17): X is A or G
  MISC_FEATURE (18)..(18): X is A or G
  MISC_FEATURE (19)..(19): X is D and E for acidic amino acids
  MISC_FEATURE (20)..(20): X is F or P
  MISC_FEATURE (21)..(21): X is K, R or H for basic amino acids
  MISC_FEATURE (22)..(22): X is K, R or H for basic amino acids
XXXXXXXXXXXXXXXXXXXXXX

SEQ ID NO: 157 - protein, 36 aa, Artificial
  Completely synthesized peptide construct
DGQEEKAGVVSTGLIGGGSAFDVLSFTAEEKAGVYK

SEQ ID NO: 158 - protein, 37 aa, Artificial
  peptide construct
  MISC_FEATURE (1)..(1): X is D and E for acidic amino acids
  MISC_FEATURE (2)..(2): X is A or G
  MISC_FEATURE (3)..(3): X is N or Q for amidated amino acids
  MISC_FEATURE (4)..(4): X is D and E for acidic amino acids
  MISC_FEATURE (5)..(5): X is D and E for acidic amino acids
  MISC_FEATURE (6)..(6): X is K, R or H for basic amino acids
  MISC_FEATURE (7)..(7): X is A or G
  MISC_FEATURE (8)..(8): X is A or G
  MISC_FEATURE (9)..(9): X is I, L or V
  MISC_FEATURE (10)..(10): X is I, L or V
  MISC_FEATURE (11)..(11): X is C or S
  MISC_FEATURE (12)..(12): X is T or S
  MISC_FEATURE (13)..(13): X is A or G
  MISC_FEATURE (14)..(14): X is I, L or V
  MISC_FEATURE (15)..(15): X is I, L or V
  MISC_FEATURE (16)..(16): X is A or G
  MISC_FEATURE (17)..(17): X is A or G
  MISC_FEATURE (18)..(18): X is A or G
  MISC_FEATURE (19)..(19): X is D and E for acidic amino acids
  MISC_FEATURE (20)..(20): X is C or S
  MISC_FEATURE (21)..(21): X is A or G
  MISC_FEATURE (22)..(22): X is F, W or Y for aromatic amino acids
  MISC_FEATURE (23)..(23): X is D and E for acidic amino acids
  MISC_FEATURE (24)..(24): X is I, L or V
  MISC_FEATURE (25)..(25): X is I, L or V
  MISC_FEATURE (26)..(26): X is C or S
  MISC_FEATURE (27)..(27): X is F, W or Y for aromatic amino acids
  MISC_FEATURE (28)..(28): X is T or S
  MISC_FEATURE (29)..(29): X is A or G
  MISC_FEATURE (30)..(30): X is D and E for acidic amino acids
  MISC_FEATURE (31)..(31): X is D and E for acidic amino acids
  MISC_FEATURE (32)..(32): X is K, R or H for basic amino acids
  MISC_FEATURE (33)..(33): X is A or G
  MISC_FEATURE (34)..(34): X is A or G
  MISC_FEATURE (35)..(35): X is I, L or V
  MISC_FEATURE (36)..(36): X is F, W or Y for aromatic amino acids
  MISC_FEATURE (37)..(37): X is K, R or H for basic amino acids
XXXXXXXXXXXXXXXXXXXXXXXXXXXXXXXXXXXXX

SEQ ID NO: 159 - protein, 18 aa, Artificial
  Completely synthesized peptide construct
DGQEEKAGVVSTGLIGGG

SEQ ID NO: 160 - protein, 32 aa, Artificial
  peptide construct
  MISC_FEATURE (1)..(1): X is D and E for acidic amino acids
  MISC_FEATURE (2)..(2): X is A or G
  MISC_FEATURE (3)..(3): X is N or Q for amidated amino acids
  MISC_FEATURE (4)..(4): X is D and E for acidic amino acids
  MISC_FEATURE (5)..(5): X is D and E for acidic amino acids
  MISC_FEATURE (6)..(6): X is K, R or H for basic amino acids
  MISC_FEATURE (7)..(7): X is A or G
  MISC_FEATURE (8)..(8): X is A or G
  MISC_FEATURE (9)..(9): X is I, L or V
  MISC_FEATURE (10)..(10): X is I, L or V
  MISC_FEATURE (11)..(11): X is C or S
  MISC_FEATURE (12)..(12): X is T or S
  MISC_FEATURE (13)..(13): X is A or G
  MISC_FEATURE (14)..(14): X is I, L or V
  MISC_FEATURE (15)..(15): X is I, L or V
  MISC_FEATURE (16)..(16): X is A or G
  MISC_FEATURE (17)..(17): X is A or G
  MISC_FEATURE (18)..(18): X is A or G
  MOD_RES (19)..(19): ACETYLATION
  MISC_FEATURE (19)..(19): X is C or S
  MISC_FEATURE (20)..(20): X is I, L or V
  MISC_FEATURE (21)..(21): X is K, R or H for basic amino acids
  MISC_FEATURE (22)..(22): X is I, L or V
  MISC_FEATURE (23)..(23): X is M or Nle
  MISC_FEATURE (24)..(24): X is A or G
  MISC_FEATURE (25)..(25): X is T or S
  MISC_FEATURE (26)..(26): X is I, L or V
  MISC_FEATURE (27)..(27): X is F or P
  MISC_FEATURE (28)..(28): X is C or S
  MISC_FEATURE (29)..(29): X is T or S
  MISC_FEATURE (30)..(30): X is F, W or Y for aromatic amino acids
  MISC_FEATURE (31)..(31): X is A or G
  MISC_FEATURE (32)..(32): X is C or S
XXXXXXXXXXXXXXXXXXXXXXXXXXXXXXXX

SEQ ID NO: 161 - protein, 18 aa, Artificial
  Completely synthesized peptide construct
DGQEEKAGVVSTGLIGGG

SEQ ID NO: 162 - protein, 32 aa, Artificial; identical to SEQ ID NO: 160
  peptide construct
  MISC_FEATURE (1)..(1): X is D and E for acidic amino acids
  MISC_FEATURE (2)..(2): X is A or G
  MISC_FEATURE (3)..(3): X is N or Q for amidated amino acids
  MISC_FEATURE (4)..(4): X is D and E for acidic amino acids
  MISC_FEATURE (5)..(5): X is D and E for acidic amino acids
  MISC_FEATURE (6)..(6): X is K, R or H for basic amino acids
  MISC_FEATURE (7)..(7): X is A or G
  MISC_FEATURE (8)..(8): X is A or G
  MISC_FEATURE (9)..(9): X is I, L or V
  MISC_FEATURE (10)..(10): X is I, L or V
  MISC_FEATURE (11)..(11): X is C or S
  MISC_FEATURE (12)..(12): X is T or S
  MISC_FEATURE (13)..(13): X is A or G
  MISC_FEATURE (14)..(14): X is I, L or V
  MISC_FEATURE (15)..(15): X is I, L or V
  MISC_FEATURE (16)..(16): X is A or G
  MISC_FEATURE (17)..(17): X is A or G
  MISC_FEATURE (18)..(18): X is A or G
  MISC_FEATURE (19)..(19): X is C or S
  MISC_FEATURE (20)..(20): X is I, L or V
  MISC_FEATURE (21)..(21): X is K, R or H for basic amino acids
  MISC_FEATURE (22)..(22): X is I, L or V
  MISC_FEATURE (23)..(23): X is M or Nle
  MISC_FEATURE (24)..(24): X is A or G
  MISC_FEATURE (25)..(25): X is T or S
  MISC_FEATURE (26)..(26): X is I, L or V
  MISC_FEATURE (27)..(27): X is F or P
  MISC_FEATURE (28)..(28): X is C or S
  MISC_FEATURE (29)..(29): X is C or S
  MISC_FEATURE (30)..(30): X is F, W or Y for aromatic amino acids
  MISC_FEATURE (31)..(31): X is A or G
  MISC_FEATURE (32)..(32): X is T or S

SEQ ID NO: 163 - protein, 29 aa, Artificial
  Completely synthesized peptide construct
DGQEEKAGVVSTGLIGGGNITEIADLTQK

SEQ ID NO: 164 - protein, 29 aa, Artificial
  peptide construct
  MISC_FEATURE (1)..(1): X is D and E for acidic amino acids
  MISC_FEATURE (2)..(2): X is A or G
  MISC_FEATURE (3)..(3): X is N or Q for amidated amino acids
  MISC_FEATURE (4)..(4): X is D and E for acidic amino acids
  MISC_FEATURE (5)..(5): X is D and E for acidic amino acids
  MISC_FEATURE (6)..(6): X is K, R or H for basic amino acids
  MISC_FEATURE (7)..(7): X is A or G
  MISC_FEATURE (8)..(8): X is A or G
  MISC_FEATURE (9)..(9): X is I, L or V
  MISC_FEATURE (10)..(10): X is I, L or V
  MISC_FEATURE (11)..(11): X is C or S
  MISC_FEATURE (12)..(12): X is T or S
  MISC_FEATURE (13)..(13): X is A or G
  MISC_FEATURE (14)..(14): X is I, L or V
  MISC_FEATURE (15)..(15): X is I, L or V
  MISC_FEATURE (16)..(16): X is A or G
  MISC_FEATURE (17)..(17): X is A or G
  MISC_FEATURE (18)..(18): X is A or G
  MISC_FEATURE (19)..(19): X is N or Q for amidated amino acids
  MISC_FEATURE (20)..(20): X is I, L or V
  MISC_FEATURE (21)..(21): X is T or S
  MISC_FEATURE (22)..(22): X is D and E for acidic amino acids
  MISC_FEATURE (23)..(23): X is I, L or V
  MISC_FEATURE (24)..(24): X is A or G
  MISC_FEATURE (25)..(25): X is D and E for acidic amino acids
  MISC_FEATURE (26)..(26): X is I, L or V
  MISC_FEATURE (27)..(27): X is T or S
  MISC_FEATURE (28)..(28): X is N or Q for amidated amino acids
  MISC_FEATURE (29)..(29): X is K, R or H for basic amino acids
XXXXXXXXXXXXXXXXXXXXXXXXXXXXX

SEQ ID NO: 165 - protein, 58 aa, Artificial
  Completely synthesized peptide construct
DGQEEKAGVVSTGLIGGGNMYAMMIARFKMFPEVKEKGMAALPRLIAFTSEHSHFSLK

SEQ ID NO: 166 - protein, 58 aa, Artificial; identical to SEQ ID NO: 142
  peptide construct
  MISC_FEATURE (1)..(1): X is D and E for acidic amino acids
  MISC_FEATURE (2)..(2): X is A or G
  MISC_FEATURE (3)..(3): X is N or Q for amidated amino acids
  MISC_FEATURE (4)..(4): X is D and E for acidic amino acids
  MISC_FEATURE (5)..(5): X is D and E for acidic amino acids
  MISC_FEATURE (6)..(6): X is K, R or H for basic amino acids
  MISC_FEATURE (7)..(7): X is A or G
  MISC_FEATURE (8)..(8): X is A or G
  MISC_FEATURE (9)..(9): X is I, L or V
  MISC_FEATURE (10)..(10): X is I, L or V
  MISC_FEATURE (11)..(11): X is C or S
  MISC_FEATURE (12)..(12): X is T or S
  MISC_FEATURE (13)..(13): X is A or G
  MISC_FEATURE (14)..(14): X is I, L or V
  MISC_FEATURE (15)..(15): X is I, L or V
  MISC_FEATURE (16)..(16): X is A or G
  MISC_FEATURE (17)..(17): X is A or G
  MISC_FEATURE (18)..(18): X is A or G
  MISC_FEATURE (19)..(19): X is N or Q for amidated amino acids
  MISC_FEATURE (20)..(20): X is M or Nle
  MISC_FEATURE (21)..(21): X is F, W or Y for aromatic amino acids
  MISC_FEATURE (22)..(22): X is A or G
  MISC_FEATURE (23)..(23): X is M or Nle
  MISC_FEATURE (24)..(24): X is M or Nle
  MISC_FEATURE (25)..(25): X is I, L or V
  MISC_FEATURE (26)..(26): X is A or G
  MISC_FEATURE (27)..(27): X is K, R or H for basic amino acids
  MISC_FEATURE (28)..(28): X is F, W or Y for aromatic amino acids
  MISC_FEATURE (29)..(29): X is K, R or H for basic amino acids
  MISC_FEATURE (30)..(30): X is M or Nle
  MISC_FEATURE (31)..(31): X is F, W or Y for aromatic amino acids
  MISC_FEATURE (32)..(32): X is F or P
  MISC_FEATURE (33)..(33): X is D and E for acidic amino acids
  MISC_FEATURE (34)..(34): X is I, L or V
  MISC_FEATURE (35)..(35): X is K, R or H for basic amino acids
  MISC_FEATURE (36)..(36): X is D and E for acidic amino acids
  MISC_FEATURE (37)..(37): X is K, R or H for basic amino acids
  MISC_FEATURE (38)..(38): X is A or G
  MISC_FEATURE (39)..(39): X is M or Nle
  MISC_FEATURE (40)..(40): X is A or G
  MISC_FEATURE (41)..(41): X is A or G
  MISC_FEATURE (42)..(42): X is I, L or V
  MISC_FEATURE (43)..(43): X is F or P
  MISC_FEATURE (44)..(44): X is K, R or H for basic amino acids
  MISC_FEATURE (45)..(45): X is I, L or V
  MISC_FEATURE (46)..(46): X is I, L or V
  MISC_FEATURE (47)..(47): X is A or G
  MISC_FEATURE (48)..(48): X is F, W or Y for aromatic amino acids
  MISC_FEATURE (49)..(49): X is T or S
  MISC_FEATURE (50)..(50): X is C or S
  MISC_FEATURE (51)..(51): X is D and E for acidic amino acids
  MISC_FEATURE (52)..(52): X is K, R or H for basic amino acids
  MISC_FEATURE (53)..(53): X is C or S
  MISC_FEATURE (54)..(54): X is K, R or H for basic amino acids
  MISC_FEATURE (55)..(55): X is F, W or Y for aromatic amino acids
  MISC_FEATURE (56)..(56): X is C or S
  MISC_FEATURE (57)..(57): X is I, L or V
  MISC_FEATURE (58)..(58): X is K, R or H for basic amino acids

SEQ ID NO: 167 - protein, 51 aa, Artificial
  Completely synthesized peptide construct
DGQEEKAGVVSTGLIGGGIARFKMFPEVKEKGMAALPRLIATSEHSHFSLK

SEQ ID NO: 168 - protein, 52 aa, Artificial
  peptide construct
  MISC_FEATURE (1)..(1): X is D and E for acidic amino acids
  MISC_FEATURE (2)..(2): X is A or G
  MISC_FEATURE (3)..(3): X is N or Q for aromatic amino acids
  MISC_FEATURE (4)..(4): X is D and E for acidic amino acids
  MISC_FEATURE (5)..(5): X is D and E for acidic amino acids
  MISC_FEATURE (6)..(6): X is K, R or H for basic amino acids
  MISC_FEATURE (7)..(7): X is A or G
  MISC_FEATURE (8)..(8): X is A or G
  MISC_FEATURE (9)..(9): X is I, L or V
  MISC_FEATURE (10)..(10): X is I, L or V
  MISC_FEATURE (11)..(11): X is C or S
  MISC_FEATURE (12)..(12): X is T or S
  MISC_FEATURE (13)..(13): X is A or G
  MISC_FEATURE (14)..(14): X is I, L or V
  MISC_FEATURE (15)..(15): X is I, L or V
  MISC_FEATURE (16)..(16): X is A or G
  MISC_FEATURE (17)..(17): X is A or G
  MISC_FEATURE (18)..(18): X is A or G
  MISC_FEATURE (19)..(19): X is I, L or V
  MISC_FEATURE (20)..(20): X is A or G
  MISC_FEATURE (21)..(21): X is K, R or H for basic amino acids
  MISC_FEATURE (22)..(22): X is F, W or Y for aromatic amino acids
  MISC_FEATURE (23)..(23): X is K, R or H for basic amino acids
  MISC_FEATURE (24)..(24): X is M or Nle
  MISC_FEATURE (25)..(25): X is F, W or Y for aromatic amino acids
  MISC_FEATURE (26)..(26): X is F or P
  MISC_FEATURE (27)..(27): X is D and E for acidic amino acids
  MISC_FEATURE (28)..(28): X is I, L or V
  MISC_FEATURE (29)..(29): X is K, R or H basic amino acids
  MISC_FEATURE (30)..(30): X is D and E for acidic amino acids
  MISC_FEATURE (31)..(31): X is D and E for acidic amino acids
  MISC_FEATURE (32)..(32): X is A or G
  MISC_FEATURE (33)..(33): X is M or Nle
  MISC_FEATURE (34)..(34): X is  A or G
  MISC_FEATURE (35)..(35): X is  A or G
  MISC_FEATURE (36)..(36): X is I, L or V
  MISC_FEATURE (37)..(37): X is F or P
  MISC_FEATURE (38)..(38): X is K, R or H for basic amino acids
  MISC_FEATURE (39)..(39): X is I, L or V
  MISC_FEATURE (40)..(40): X is I, L or V
  MISC_FEATURE (41)..(41): X is A or G
  MISC_FEATURE (42)..(42): X is F, W or Y for aromatic amino acids
  MISC_FEATURE (43)..(43): X is T or S
  MISC_FEATURE (44)..(44): X is C or S
  MISC_FEATURE (45)..(45): X is D and  E for acidic amino acids
  MISC_FEATURE (46)..(46): X is K, R or H basic amino acids
  MISC_FEATURE (47)..(47): X is C or S
  MISC_FEATURE (48)..(48): X is K, R or H basic amino acids
  MISC_FEATURE (49)..(49): X is F, W or Y for aromatic amino acids
  MISC_FEATURE (50)..(50): X is C or S
  MISC_FEATURE (51)..(51): X is I, L or V
  MISC_FEATURE (52)..(52): X is K, R or H basic amino acids
XXXXXXXXXXXXXXXXXXXXXXXXXXXXXXXXXXXXXXXXXXXXXXXXXXXX

SEQ ID NO: 169 - protein, 38 aa, Artificial
  Completely synthesized peptide construct
DGQEEKAGVVSTGLIGGGSRLSKVAPVIKARMMEYGTT

SEQ ID NO: 170 - protein, 38 aa, Artificial
  peptide construct
  MISC_FEATURE (1)..(1): X is D and E for acidic amino acids
  MISC_FEATURE (2)..(2): X is A or G
  MISC_FEATURE (3)..(3): X is N or Q for amidated amino acids
  MISC_FEATURE (4)..(4): X is D and E for acidic amino acids
  MISC_FEATURE (5)..(5): X is D and E for acidic amino acids
  MISC_FEATURE (6)..(6): X is K, R or H for basic amino acids
  MISC_FEATURE (7)..(7): X is A or G
  MISC_FEATURE (8)..(8): X is A or G
  MISC_FEATURE (9)..(9): X is I, L or V
  MISC_FEATURE (10)..(10): X is I, L or V
  MISC_FEATURE (11)..(11): X is C or S
  MISC_FEATURE (12)..(12): X is T or S
  MISC_FEATURE (13)..(13): X is A or G
  MISC_FEATURE (14)..(14): X is I, L or V
  MISC_FEATURE (15)..(15): X is I, L or V
  MISC_FEATURE (16)..(16): X is A  or G
  MISC_FEATURE (17)..(17): X is A  or G
  MISC_FEATURE (18)..(18): X is A  or G
  MISC_FEATURE (19)..(19): X is C or S
  MISC_FEATURE (20)..(20): X is K, R or H for basic amino acids
  MISC_FEATURE (21)..(21): X is I, L or V
  MISC_FEATURE (22)..(22): X is C or S
  MISC_FEATURE (23)..(23): X is K, R or H for basic amino acids
  MISC_FEATURE (24)..(24): X is I, L or V
  MISC_FEATURE (25)..(25): X is A or G
  MISC_FEATURE (26)..(26): X is F or P
  MISC_FEATURE (27)..(27): X is I, L or V
  MISC_FEATURE (28)..(28): X is I, L or V
  MISC_FEATURE (29)..(29): X is K, R or H for basic amino acids
  MISC_FEATURE (30)..(30): X is A or G
  MISC_FEATURE (31)..(31): X is K, R or H for basic amino acids
  MISC_FEATURE (32)..(32): X is M or Nle
  MISC_FEATURE (33)..(33): X is M or Nle
  MISC_FEATURE (34)..(34): X is D and E for acidic amino acids
  MISC_FEATURE (35)..(35): X is F, W or Y for aromatic amino acids
  MISC_FEATURE (36)..(36): X is A or G
  MISC_FEATURE (37)..(37): X is T or S
  MISC_FEATURE (38)..(38): X is T or S
XXXXXXXXXXXXXXXXXXXXXXXXXXXXXXXXXXXXXX

SEQ ID NO: 171 - protein, 37 aa, Artificial
  Completely synthesized peptide construct
DGQEEKAGVVSTGLIGGGIPPSLRYLEDEERMSRLSK

SEQ ID NO: 172 - protein, 36 aa, Artificial
  peptide construct
  MISC_FEATURE (1)..(1): X is D and E for acidic amino acids
  MISC_FEATURE (2)..(2): X is A or G
  MISC_FEATURE (3)..(3): X is N or Q for aromatic amino acids
  MISC_FEATURE (4)..(4): X is D and E for acidic amino acids
  MISC_FEATURE (5)..(5): X is D and E for acidic amino acids
  MISC_FEATURE (6)..(6): X is K, R or H for basic amino acids
  MISC_FEATURE (7)..(7): X is A or G
  MISC_FEATURE (8)..(8): X is A or G
  MISC_FEATURE (9)..(9): X is I, L or V
  MISC_FEATURE (10)..(10): X is I, L or V
  MISC_FEATURE (11)..(11): X is C or S
  MISC_FEATURE (12)..(12): X is T or S
  MISC_FEATURE (13)..(13): X is A or G
  MISC_FEATURE (14)..(14): X is I, L or V
  MISC_FEATURE (15)..(15): X is I, L or V
  MISC_FEATURE (16)..(16): X is A or G
  MISC_FEATURE (17)..(17): X is A or G
  MISC_FEATURE (18)..(18): X is A or G
  MISC_FEATURE (19)..(19): X is I, L or V
  MISC_FEATURE (20)..(20): X is F or P
  MISC_FEATURE (21)..(21): X is F or P
  MISC_FEATURE (22)..(22): X is C or S
  MISC_FEATURE (23)..(23): X is I, L or V
  MISC_FEATURE (24)..(24): X is K, R or H for basic amino acids
  MISC_FEATURE (25)..(25): X is F, W or Y for aromatic amino acids
  MISC_FEATURE (26)..(26): X is D and E for acidic amino acids
  MISC_FEATURE (27)..(27): X is D and E for acidic amino acids
  MISC_FEATURE (28)..(28): X is D and E for acidic amino acids
  MISC_FEATURE (29)..(29): X is D and E for acidic amino acids
  MISC_FEATURE (30)..(30): X is K, R or H for basic amino acids
  MISC_FEATURE (31)..(31): X is M or Nle
  MISC_FEATURE (32)..(32): X is  C or S
  MISC_FEATURE (33)..(33): X is K, R or H for basic amino acids
  MISC_FEATURE (34)..(34): X is I, L or V
  MISC_FEATURE (35)..(35): X is C or S
  MISC_FEATURE (36)..(36): X is K, R or H for basic amino acids
XXXXXXXXXXXXXXXXXXXXXXXXXXXXXXXXXXXX

SEQ ID NO: 173 - protein, 38 aa, Artificial
  Completely synthesized peptide construct
DGQEEKAGVVSTGLIGGGNTNMFTYEIAPVFVLLEYVT

SEQ ID NO: 174 - protein, 38 aa, Artificial; identical to SEQ ID NO: 170
  peptide construct
  MISC_FEATURE (1)..(1): X is D and E for acidic amino acids
  MISC_FEATURE (2)..(2): X is A or G
  MISC_FEATURE (3)..(3): X is N or Q for amidated amino acids
  MISC_FEATURE (4)..(4): X is D and E for acidic amino acids
  MISC_FEATURE (5)..(5): X is D and E for acidic amino acids
  MISC_FEATURE (6)..(6): X is K, R or H for basic amino acids
  MISC_FEATURE (7)..(7): X is  A or G
  MISC_FEATURE (8)..(8): X is  A or G
  MISC_FEATURE (9)..(9): X is I, L or V
  MISC_FEATURE (10)..(10): X is I, L or V
  MISC_FEATURE (11)..(11): X is C or S
  MISC_FEATURE (12)..(12): X is T or S
  MISC_FEATURE (13)..(13): X is A or G
  MISC_FEATURE (14)..(14): X is I, L or V
  MISC_FEATURE (15)..(15): X is I, L or V
  MISC_FEATURE (16)..(16): X is A or G
  MISC_FEATURE (17)..(17): X is A or G
  MISC_FEATURE (18)..(18): X is A or G
  MISC_FEATURE (19)..(19): X is N or Q for amidated amino acids
  MISC_FEATURE (20)..(20): X is T or S
  MISC_FEATURE (21)..(21): X is N or Q for aromatic amino acids
  MISC_FEATURE (22)..(22): X is M or Nle
  MISC_FEATURE (23)..(23): X is F, W or Y for aromatic amino acids
  MISC_FEATURE (24)..(24): X is T or S
  MISC_FEATURE (25)..(25): X is F, W or Y for aromatic amino acids
  MISC_FEATURE (26)..(26): X is D and E for acidic amino acids
  MISC_FEATURE (27)..(27): X is I, L or V
  MISC_FEATURE (28)..(28): X is A or G
  MISC_FEATURE (29)..(29): X is F or P
  MISC_FEATURE (30)..(30): X is I, L or V
  MISC_FEATURE (31)..(31): X is F, W or Y for aromatic amino acids
  MISC_FEATURE (32)..(32): X is I, L or V
  MISC_FEATURE (33)..(33): X is I, L or V
  MISC_FEATURE (34)..(34): X is I, L or V
  MISC_FEATURE (35)..(35): X is D and E for acidic amino acids
  MISC_FEATURE (36)..(36): X is F, W or Y for aromatic amion acids
  MISC_FEATURE (37)..(37): X is I, L or V
  MISC_FEATURE (38)..(38): X is T or S

SEQ ID NO: 175 - protein, 33 aa, Artificial
  Completely synthesized peptide construct
DGQEEKAGVVSTGLIGGGFKADEKKFWGKYLYE

SEQ ID NO: 176 - protein, 33 aa, Artificial; identical to SEQ ID NO: 99
  peptide construct
  MISC_FEATURE (1)..(1): X is D and E for acidic amino acids
  MISC_FEATURE (2)..(2): X is A or G
  MISC_FEATURE (3)..(3): X is N or Q for amidated amino acids
  MISC_FEATURE (4)..(4): X is D and E for acidic amino acids
  MISC_FEATURE (5)..(5): X is D and E for acidic amino acids
  MISC_FEATURE (6)..(6): X is K, R or H for basic amino acids
  MISC_FEATURE (7)..(7): X is A or G
  MISC_FEATURE (8)..(8): X is A or G
  MISC_FEATURE (9)..(9): X is I, L or V
  MISC_FEATURE (10)..(10): X is I, L or V
  MISC_FEATURE (11)..(11): X is C or S
  MISC_FEATURE (12)..(12): X is T or S
  MISC_FEATURE (13)..(13): X is A or G
  MISC_FEATURE (14)..(14): X is I, L or V
  MISC_FEATURE (15)..(15): X is I, L or V
  MISC_FEATURE (16)..(16): X is A or G
  MISC_FEATURE (17)..(17): X is A or G
  MISC_FEATURE (18)..(18): X is A or G
  MISC_FEATURE (19)..(19): X is F, W or Y for aromatic amino acids
  MISC_FEATURE (20)..(20): X is K, R or H for basic amino acids
  MISC_FEATURE (21)..(21): X is  A or G
  MISC_FEATURE (22)..(22): X is D and E for acidic amino acids
  MISC_FEATURE (23)..(23): X is D and E for acidic amino acids
  MISC_FEATURE (24)..(24): X is K, R or H for basic amino acids
  MISC_FEATURE (25)..(25): X is K, R or H for basic amino acids
  MISC_FEATURE (26)..(26): X is F, W or Y for aromatic amino acids
  MISC_FEATURE (27)..(27): X is F, W or Y for aromatic amino acids
  MISC_FEATURE (28)..(28): X is A or G
  MISC_FEATURE (29)..(29): X is K, R or H for basic amino acids
  MISC_FEATURE (30)..(30): X is F, W or Y for aromatic amino acids
  MISC_FEATURE (31)..(31): X is I, L or V
  MISC_FEATURE (32)..(32): X is F, W or Y for aromatic amino acids
  MISC_FEATURE (33)..(33): X is D and E for acidic amino acids

SEQ ID NO: 177 - protein, 33 aa, Artificial
  Completely synthesized peptide construct
DGQEEKAGVVSTGLIGGGSHLVEALYLVCGERG

SEQ ID NO: 178 - protein, 32 aa, Artificial; identical to SEQ ID NO: 160
  peptide construct
  MISC_FEATURE (1)..(1): X is D and E for acidic amino acids
  MISC_FEATURE (2)..(2): X is A or G
  MISC_FEATURE (3)..(3): X is N or Q for amidated amino acids
  MISC_FEATURE (4)..(4): X is D and E for acidic amino acids
  MISC_FEATURE (5)..(5): X is D and E for acidic amino acids
  MISC_FEATURE (6)..(6): X is K, R or H for basic amino acids
  MISC_FEATURE (7)..(7): X is A or G
  MISC_FEATURE (8)..(8): X is A or G
  MISC_FEATURE (9)..(9): X is I, L or V
  MISC_FEATURE (10)..(10): X is I, L or V
  MISC_FEATURE (11)..(11): X is C or S
  MISC_FEATURE (12)..(12): X is T or S
  MISC_FEATURE (13)..(13): X is A or G
  MISC_FEATURE (14)..(14): X is I, L or V
  MISC_FEATURE (15)..(15): X is I, L or V
  MISC_FEATURE (16)..(16): X is A or G
  MISC_FEATURE (17)..(17): X is A or G
  MISC_FEATURE (18)..(18): X is A or G
  MISC_FEATURE (19)..(19): X is C or S
  MISC_FEATURE (20)..(20): X is K, R or H for basic amino acids
  MISC_FEATURE (21)..(21): X is I, L or V
  MISC_FEATURE (22)..(22): X is I, L or V
  MISC_FEATURE (23)..(23): X is D and E for acidic amino acids
  MISC_FEATURE (24)..(24): X is A or G
  MISC_FEATURE (25)..(25): X is I, L or V
  MISC_FEATURE (26)..(26): X is F, W or Y for aromatic amino acids
  MISC_FEATURE (27)..(27): X is I, L or V
  MISC_FEATURE (28)..(28): X is C or S
  MISC_FEATURE (29)..(29): X is A or G
  MISC_FEATURE (30)..(30): X is D and E for acidic amino acids
  MISC_FEATURE (31)..(31): X is K, R or H for basic amino acids
  MISC_FEATURE (32)..(32): X is A or G

SEQ ID NO: 179 - protein, 42 aa, Artificial
  Completely synthesized peptide construct
DGQEEKAGVVSTGLIGGGVLGGGCALLRCIPALDSLTPANED

SEQ ID NO: 180 - protein, 42 aa, Artificial
  peptide construct
  MISC_FEATURE (1)..(1): X is D and E for acidic amino acids
  MISC_FEATURE (2)..(2): X is A or G
  MISC_FEATURE (3)..(3): X is N or Q for amidated amino acids
  MISC_FEATURE (4)..(4): X is D and E for acidic amino acids
  MISC_FEATURE (5)..(5): X is D and E for acidic amino acids
  MISC_FEATURE (6)..(6): X is K, R or H for basic amino acids
  MISC_FEATURE (7)..(7): X is A or G
  MISC_FEATURE (8)..(8): X is A or G
  MISC_FEATURE (9)..(9): X is I, L or V
  MISC_FEATURE (10)..(10): X is I, L or V
  MISC_FEATURE (11)..(11): X is C or S
  MISC_FEATURE (12)..(12): X is T or S
  MISC_FEATURE (13)..(13): X is A or G
  MISC_FEATURE (14)..(14): X is I, L or V
  MISC_FEATURE (15)..(15): X is I, L or V
  MISC_FEATURE (16)..(16): X is A or G
  MISC_FEATURE (17)..(17): X is A or G
  MISC_FEATURE (18)..(18): X is A or G
  MISC_FEATURE (19)..(19): X is I, L or V
  MISC_FEATURE (20)..(20): X is I, L or V
  MISC_FEATURE (21)..(21): X is A or G
  MISC_FEATURE (22)..(22): X is A or G
  MISC_FEATURE (23)..(23): X is A or G
  MISC_FEATURE (24)..(24): X is C or S
  MISC_FEATURE (25)..(25): X is A or G
  MISC_FEATURE (26)..(26): X is I, L or V
  MISC_FEATURE (27)..(27): X is I, L or V
  MISC_FEATURE (28)..(28): X is K, R or H for basic amino acids
  MISC_FEATURE (29)..(29): X is C  or S
  MISC_FEATURE (30)..(30): X is I, L or V
  MISC_FEATURE (31)..(31): X is F or P
  MISC_FEATURE (32)..(32): X is A or G
  MISC_FEATURE (33)..(33): X is I, L or V
  MISC_FEATURE (34)..(34): X is D and E for acidic amino acids
  MISC_FEATURE (35)..(35): X is C or S
  MISC_FEATURE (36)..(36): X is I, L or V
  MISC_FEATURE (37)..(37): X is T or S
  MISC_FEATURE (38)..(38): X is F or P
  MISC_FEATURE (39)..(39): X is A or G
  MISC_FEATURE (40)..(40): X is N or Q for amidated amino acids
  MISC_FEATURE (41)..(41): X is D and E for acidic amino acids
  MISC_FEATURE (42)..(42): X is D and E for acidic amino acids
XXXXXXXXXXXXXXXXXXXXXXXXXXXXXXXXXXXXXXXXXX

SEQ ID NO: 181 - protein, 46 aa, Artificial
  Completely synthesized peptide construct
DGQEEKAGVVSTGLIGGGEACVTSWLWSGEGAVFYRVDLHFINLGT

SEQ ID NO: 182 - protein, 46 aa, Artificial; identical to SEQ ID NO: 144
  peptide construct
  MISC_FEATURE (1)..(1): X is D and E for acidic amino acids
  MISC_FEATURE (2)..(2): X is A or G
  MISC_FEATURE (3)..(3): X is N or Q for amidated amino acids
  MISC_FEATURE (4)..(4): X is D and E for acidic amino acids
  MISC_FEATURE (5)..(5): X is D and E for acidic amino acids
  MISC_FEATURE (6)..(6): X is K, R or H for basic amino acids
  MISC_FEATURE (7)..(7): X is A or G
  MISC_FEATURE (8)..(8): X is A or G
  MISC_FEATURE (9)..(9): X is I, L or V
  MISC_FEATURE (10)..(10): X is I, L or V
  MISC_FEATURE (11)..(11): X is C or S
  MISC_FEATURE (12)..(12): X is T or S
  MISC_FEATURE (13)..(13): X is A or G
  MISC_FEATURE (14)..(14): X is I, L or V
  MISC_FEATURE (15)..(15): X is I, L or V
  MISC_FEATURE (16)..(16): X is A or G
  MISC_FEATURE (17)..(17): X is A or G
  MISC_FEATURE (18)..(18): X is A or G
  MISC_FEATURE (19)..(19): X is D and E for acidic amino acids
  MISC_FEATURE (20)..(20): X is A or G
  MISC_FEATURE (21)..(21): X is C or S
  MISC_FEATURE (22)..(22): X is I, L or V
  MISC_FEATURE (23)..(23): X is T or S
  MISC_FEATURE (24)..(24): X is C or S
  MISC_FEATURE (25)..(25): X is F, W or Y for aromatic amino acids
  MISC_FEATURE (26)..(26): X is I, L or V
  MISC_FEATURE (27)..(27): X is F, W or Y for aromatic amino acids
  MISC_FEATURE (28)..(28): X is C or S
  MISC_FEATURE (29)..(29): X is A or G
  MISC_FEATURE (30)..(30): X is D and E for acidic amino acids
  MISC_FEATURE (31)..(31): X is A or G
  MISC_FEATURE (32)..(32): X is A or G
  MISC_FEATURE (33)..(33): X is I, L or V
  MISC_FEATURE (34)..(34): X is F, W or Y for aromatic amino acids
  MISC_FEATURE (35)..(35): X is F, W or Y for aromatic amino acids
  MISC_FEATURE (36)..(36): X is K, R or H for basic amino acids
  MISC_FEATURE (37)..(37): X is I, L or V
  MISC_FEATURE (38)..(38): X is D and E for acidic amino acids
  MISC_FEATURE (39)..(39): X is I, L or V
  MISC_FEATURE (40)..(40): X is K, R or H for basic amino acids
  MISC_FEATURE (41)..(41): X is F, W or Y for aromatic amino acids
  MISC_FEATURE (42)..(42): X is I, L or V
  MISC_FEATURE (43)..(43): X is N or Q for amidated amino acids
  MISC_FEATURE (44)..(44): X is I, L or V
  MISC_FEATURE (45)..(45): X is A or G
  MISC_FEATURE (46)..(46): X is T or S

SEQ ID NO: 183 - protein, 39 aa, Artificial
  Completely synthesized peptide construct
DGQEEKAGVVSTGLIGGGMDFWCVEHDRPPPATPTSLTT

SEQ ID NO: 184 - protein, 39 aa, Artificial
  peptide construct
  MISC_FEATURE (1)..(1): X is D and E for acidic amino acids
  MISC_FEATURE (2)..(2): X is A or G
  MISC_FEATURE (3)..(3): X is N or Q for amidated amino acids
  MISC_FEATURE (4)..(4): X is D and E for acidic amino acids
  MISC_FEATURE (5)..(5): X is D and E for acidic amino acids
  MISC_FEATURE (6)..(6): X is K, R or H for basic amino acids
  MISC_FEATURE (7)..(7): X is  A or G
  MISC_FEATURE (8)..(8): X is  A or G
  MISC_FEATURE (9)..(9): X is I, L or V
  MISC_FEATURE (10)..(10): X is I, L or V
  MISC_FEATURE (11)..(11): X is C or S
  MISC_FEATURE (12)..(12): X is T or S
  MISC_FEATURE (13)..(13): X is A or G
  MISC_FEATURE (14)..(14): X is I, L or V
  MISC_FEATURE (15)..(15): X is I, L or V
  MISC_FEATURE (16)..(16): X is A or G
  MISC_FEATURE (17)..(17): X is A or G
  MISC_FEATURE (18)..(18): X is A or G
  MISC_FEATURE (19)..(19): X is M or Nle
  MISC_FEATURE (20)..(20): X is D and E for acidic amino acids
  MISC_FEATURE (21)..(21): X is F, W or Y for aromatic amino acids
  MISC_FEATURE (22)..(22): X is F, W or Y for aromatic amino acids
  MISC_FEATURE (23)..(23): X is C or S
  MISC_FEATURE (24)..(24): X is I, L or V
  MISC_FEATURE (25)..(25): X is D and E for acidic amino acids
  MISC_FEATURE (26)..(26): X is K, R or H for basic amino acids
  MISC_FEATURE (27)..(27): X is D and E for acidic amino acids
  MISC_FEATURE (28)..(28): X is K, R or H for basic amino acids
  MISC_FEATURE (29)..(29): X is F or P
  MISC_FEATURE (30)..(30): X is F or P
  MISC_FEATURE (31)..(31): X is F or P
  MISC_FEATURE (32)..(32): X is A  or G
  MISC_FEATURE (33)..(33): X is T or S
  MISC_FEATURE (34)..(34): X is F or P
  MISC_FEATURE (35)..(35): X is T or S
  MISC_FEATURE (36)..(36): X is C or S
  MISC_FEATURE (37)..(37): X is I, L or V
  MISC_FEATURE (38)..(38): X is T or S
  MISC_FEATURE (39)..(39): X is T or S
XXXXXXXXXXXXXXXXXXXXXXXXXXXXXXXXXXXXXXX

SEQ ID NO: 185 - protein, 38 aa, Artificial
  Completely synthesized peptide construct
DGQEEKAGVVSTGLIGGGNMYAMMIARFKMFPEVKEKG

SEQ ID NO: 186 - protein, 38 aa, Artificial; identical to SEQ ID NO: 170
  peptide construct
  MISC_FEATURE (1)..(1): X is D and E for acidic amino acids
  MISC_FEATURE (2)..(2): X is A or G
  MISC_FEATURE (3)..(3): X is N or Q for amidated amino acids
  MISC_FEATURE (4)..(4): X is D and E for acidic amino acids
  MISC_FEATURE (5)..(5): X is D and E for acidic amino acids
  MISC_FEATURE (6)..(6): X is K, R or H for basic amino acids
  MISC_FEATURE (7)..(7): X is A or G
  MISC_FEATURE (8)..(8): X is A or G
  MISC_FEATURE (9)..(9): X is I, L or V
  MISC_FEATURE (10)..(10): X is I, L or V
  MISC_FEATURE (11)..(11): X is C or S
  MISC_FEATURE (12)..(12): X is T or S
  MISC_FEATURE (13)..(13): X is A or G
  MISC_FEATURE (14)..(14): X is I, L or V
  MISC_FEATURE (15)..(15): X is I, L or V
  MISC_FEATURE (16)..(16): X is A or G
  MISC_FEATURE (17)..(17): X is A or G
  MISC_FEATURE (18)..(18): X is A or G
  MISC_FEATURE (19)..(19): X is N or Q for amidated amino acids
  MISC_FEATURE (20)..(20): X is M or Nle
  MISC_FEATURE (21)..(21): X is F, W or Y for aromatic amino acids
  MISC_FEATURE (22)..(22): X is A or G
  MISC_FEATURE (23)..(23): X is M or Nle
  MISC_FEATURE (24)..(24): X is M or Nle
  MISC_FEATURE (25)..(25): X is I, L or V
  MISC_FEATURE (26)..(26): X is A or G
  MISC_FEATURE (27)..(27): X is K, R or H for basic amino acids
  MISC_FEATURE (28)..(28): X is F, W or Y for aromatic amino acids
  MISC_FEATURE (29)..(29): X is K, R or H for basic amino acids
  MISC_FEATURE (30)..(30): X is M or Nle
  MISC_FEATURE (31)..(31): X is F, W or Y for aromatic amino acids
  MISC_FEATURE (32)..(32): X is F or P
  MISC_FEATURE (33)..(33): X is D and E for acidic amino acids
  MISC_FEATURE (34)..(34): X is I, L or V
  MISC_FEATURE (35)..(35): X is K, R or H for basic amino acids
  MISC_FEATURE (36)..(36): X is D and E for acidic amino acids
  MISC_FEATURE (37)..(37): X is K, R or H for basic amino acids
  MISC_FEATURE (38)..(38): X is A or G

SEQ ID NO: 187 - protein, 51 aa, Artificial
  Completely synthesized peptide construct
DGQEEKAGVVSTGLIGGGNMYAMMIARFKMFPEVKEKGMAALPRLIAFTSE

SEQ ID NO: 188 - protein, 51 aa, Artificial
  peptide construct
  MISC_FEATURE (1)..(1): X is D and E for acidic amino acids
  MISC_FEATURE (2)..(2): X is A or G
  MISC_FEATURE (3)..(3): X is N or Q for amidated amino acids
  MISC_FEATURE (4)..(4): X is D and E for acidic amino acids
  MISC_FEATURE (5)..(5): X is D and E for acidic amino acids
  MISC_FEATURE (6)..(6): X is K, R or H for basic amino acids
  MISC_FEATURE (7)..(7): X is A or G
  MISC_FEATURE (8)..(8): X is A or G
  MISC_FEATURE (9)..(9): X is I, L or V
  MISC_FEATURE (10)..(10): X is I, L or V
  MISC_FEATURE (11)..(11): X is C or S
  MISC_FEATURE (12)..(12): X is T or S
  MISC_FEATURE (13)..(13): X is A or G
  MISC_FEATURE (14)..(14): X is I, L or V
  MISC_FEATURE (15)..(15): X is I, L or V
  MISC_FEATURE (16)..(16): X is A or G
  MISC_FEATURE (17)..(17): X is A or G
  MISC_FEATURE (18)..(18): X is A or G
  MISC_FEATURE (19)..(19): X is N or Q for amidated amino acids
  MISC_FEATURE (20)..(20): X is M or Nle
  MISC_FEATURE (21)..(21): X is F, W or Y for aromatic amino acids
  MISC_FEATURE (22)..(22): X is A or G
  MISC_FEATURE (23)..(23): X is M or Nle
  MISC_FEATURE (24)..(24): X is M or Nle
  MISC_FEATURE (25)..(25): X is I, L or V
  MISC_FEATURE (26)..(26): X is A or G
  MISC_FEATURE (27)..(27): X is K, R or H for basic amino acids
  MISC_FEATURE (28)..(28): X is F, W or Y for aromatic amino acids
  MISC_FEATURE (29)..(29): X is K, R or H for basic amino acids
  MISC_FEATURE (30)..(30): X is M or Nle
  MISC_FEATURE (31)..(31): X is F, W or Y for aromatic amino acids
  MISC_FEATURE (32)..(32): X is F or P
  MISC_FEATURE (33)..(33): X is D and E for acidic amino acids
  MISC_FEATURE (34)..(34): X is I, L or V
  MISC_FEATURE (35)..(35): X is K, R or H for basic amino acids
  MISC_FEATURE (36)..(36): X is D and E for acidic amino acids
  MISC_FEATURE (37)..(37): X is K, R or H for basic amino acids
  MISC_FEATURE (38)..(38): X is A or G
  MISC_FEATURE (39)..(39): X is M or Nle
  MISC_FEATURE (40)..(40): X is A or G
  MISC_FEATURE (41)..(41): X is A or G
  MISC_FEATURE (42)..(42): X is I, L or V
  MISC_FEATURE (43)..(43): X is F or P
  MISC_FEATURE (44)..(44): X is K, R or H for basic amino acids
  MISC_FEATURE (45)..(45): X is I, L or V
  MISC_FEATURE (46)..(46): X is I, L or V
  MISC_FEATURE (47)..(47): X is A or G
  MISC_FEATURE (48)..(48): X is F, W or Y for aromatic amino acids
  MISC_FEATURE (49)..(49): X is T or S
  MISC_FEATURE (50)..(50): X is C or S
  MISC_FEATURE (51)..(51): X is D and E for acidic amino acids
XXXXXXXXXXXXXXXXXXXXXXXXXXXXXXXXXXXXXXXXXXXXXXXXXXX

SEQ ID NO: 189 - protein, 31 aa, Artificial
  Completely synthesized peptide construct
DGQEEKAGVVSTGLIGGGIAFTSEHSHFSLK

SEQ ID NO: 190 - protein, 31 aa, Artificial; identical to SEQ ID NO: 130
  peptide construct
  MISC_FEATURE (1)..(1): X is D and E for acidic amino acids
  MISC_FEATURE (2)..(2): X is A or G
  MISC_FEATURE (3)..(3): X is N or Q for amidated amino acids
  MISC_FEATURE (4)..(4): X is D and E for acidic amino acids
  MISC_FEATURE (5)..(5): X is D and E for acidic amino acids
  MISC_FEATURE (6)..(6): X is K, R or H for basic amino acids
  MISC_FEATURE (7)..(7): X is A or G
  MISC_FEATURE (8)..(8): X is A or G
  MISC_FEATURE (9)..(9): X is I, L or V
  MISC_FEATURE (10)..(10): X is I, L or V
  MISC_FEATURE (11)..(11): X is C or S
  MISC_FEATURE (12)..(12): X is T or S
  MISC_FEATURE (13)..(13): X is A or G
  MISC_FEATURE (14)..(14): X is I, L or V
  MISC_FEATURE (15)..(15): X is I, L or V
  MISC_FEATURE (16)..(16): X is A or G
  MISC_FEATURE (17)..(17): X is A or G
  MISC_FEATURE (18)..(18): X is A or G
  MISC_FEATURE (19)..(19): X is I, L or V
  MISC_FEATURE (20)..(20): X is A or G
  MISC_FEATURE (21)..(21): X is F, W or Y for aromatic amino acids
  MISC_FEATURE (22)..(22): X is T or S
  MISC_FEATURE (23)..(23): X is C or S
  MISC_FEATURE (24)..(24): X is D and E for acidic amino acids
  MISC_FEATURE (25)..(25): X is K, R or H for basic amino acids
  MISC_FEATURE (26)..(26): X is C or S
  MISC_FEATURE (27)..(27): X is K, R or H for basic amino acids
  MISC_FEATURE (28)..(28): X is F, W or Y for aromatic amino acids
  MISC_FEATURE (29)..(29): X is C or S
  MISC_FEATURE (30)..(30): X is I, L or V
  MISC_FEATURE (31)..(31): X is K, R or H for basic amino acids

SEQ ID NO: 191 - protein, 39 aa, Artificial; identical to SEQ ID NO: 183
  Completely synthesized peptide construct

SEQ ID NO: 192 - protein, 39 aa, Artificial; identical to SEQ ID NO: 184
  peptide construct
  MISC_FEATURE (1)..(1): X is D and E for acicid amino acids
  MISC_FEATURE (2)..(2): X is A or G
  MISC_FEATURE (3)..(3): X is N or Q for amidated amino acids
  MISC_FEATURE (4)..(4): X is D and E for acidic amino acids
  MISC_FEATURE (5)..(5): X is D and E for acidic amino acids
  MISC_FEATURE (6)..(6): X is K, R or H for basic amino acids
  MISC_FEATURE (7)..(7): X is A or G
  MISC_FEATURE (8)..(8): X is A or G
  MISC_FEATURE (9)..(9): X is I, L or V
  MISC_FEATURE (10)..(10): X is I, L or V
  MISC_FEATURE (11)..(11): X is C or S
  MISC_FEATURE (12)..(12): X is T or S
  MISC_FEATURE (13)..(13): X is A or G
  MISC_FEATURE (14)..(14): X is I, L or V
  MISC_FEATURE (15)..(15): X is I, L or V
  MISC_FEATURE (16)..(16): X is A or G
  MISC_FEATURE (17)..(17): X is A or G
  MISC_FEATURE (18)..(18): X is A or G
  MISC_FEATURE (19)..(19): X is M or Nle
  MISC_FEATURE (20)..(20): X is D and E for acidic amino acids
  MISC_FEATURE (21)..(21): X is F, W or Y for aromatic amino acids
  MISC_FEATURE (22)..(22): X is F, W or Y for aromatic amino acids
  MISC_FEATURE (23)..(23): X is C or S
  MISC_FEATURE (24)..(24): X is I, L or V
  MISC_FEATURE (25)..(25): X is D and E for acidic amino acids
  MISC_FEATURE (26)..(26): X is K, R or H for basic amino acids
  MISC_FEATURE (27)..(27): X is D and E for acidic amino acids
  MISC_FEATURE (28)..(28): X is K, R or H for basic amino acids
  MISC_FEATURE (29)..(29): X is F or P
  MISC_FEATURE (30)..(30): X is F or P
  MISC_FEATURE (31)..(31): X is F or P
  MISC_FEATURE (32)..(32): X is A or G
  MISC_FEATURE (33)..(33): X is T or S
  MISC_FEATURE (34)..(34): X is F or P
  MISC_FEATURE (35)..(35): X is T or S
  MISC_FEATURE (36)..(36): X is C or S
  MISC_FEATURE (37)..(37): X is I, L or V
  MISC_FEATURE (38)..(38): X is T or S
  MISC_FEATURE (39)..(39): X is T or S

SEQ ID NO: 193 - protein, 28 aa, Artificial
  Completely synthesized peptide construct
DGQEEKAGVVSTGLIGGGERPTLAFLQD

SEQ ID NO: 194 - protein, 28 aa, Artificial
  peptide construct
  MISC_FEATURE (1)..(1): X is D and E for acidic amino acids
  MISC_FEATURE (2)..(2): X is A or G
  MISC_FEATURE (3)..(3): X is N or Q for amidated amino acids
  MISC_FEATURE (4)..(4): X is D and E for acidic amino acids
  MISC_FEATURE (5)..(5): X is D and E for acidic amino acids
  MISC_FEATURE (6)..(6): X is K, R or H for basic amino acids
  MISC_FEATURE (7)..(7): X is A or G
  MISC_FEATURE (8)..(8): X is A or G
  MISC_FEATURE (9)..(9): X is I, L or V
  MISC_FEATURE (10)..(10): X is I, L or V
  MISC_FEATURE (11)..(11): X is C or S
  MISC_FEATURE (12)..(12): X is T or S
  MISC_FEATURE (13)..(13): X is A or G
  MISC_FEATURE (14)..(14): X is I, L or V
  MISC_FEATURE (15)..(15): X is I, L or V
  MISC_FEATURE (16)..(16): X is A or G
  MISC_FEATURE (17)..(17): X is A or G
  MISC_FEATURE (18)..(18): X is A or G
  MISC_FEATURE (19)..(19): X is D and E for acidic amino acids
  MISC_FEATURE (20)..(20): X is K, R or H for basic amino acids
  MISC_FEATURE (21)..(21): X is F or P
  MISC_FEATURE (22)..(22): X is T or S
  MISC_FEATURE (23)..(23): X is I, L or V
  MISC_FEATURE (24)..(24): X is A or G
  MISC_FEATURE (25)..(25): X is F, W or Y for aromatic amino acids
  MISC_FEATURE (26)..(26): X is I, L or V
  MISC_FEATURE (27)..(27): X is N or Q for amidated amino acids
  MISC_FEATURE (28)..(28): X is D and E for acidic amino acids
XXXXXXXXXXXXXXXXXXXXXXXXXXXX

SEQ ID NO: 195 - protein, 28 aa, Artificial
  Completely synthesized peptide construct
DGQEEKAGVVSTGLIGGGDRSTKVIDFH

SEQ ID NO: 196 - protein, 28 aa, Artificial
  peptide construct
  MISC_FEATURE (1)..(1): X is D and E for acidic amino acids
  MISC_FEATURE (2)..(2): X is A or G
  MISC_FEATURE (3)..(3): X is N or Q for amidated amino acids
  MISC_FEATURE (4)..(4): X is D and E for acidic amino acids
  MISC_FEATURE (5)..(5): X is D and E for acidic amino acids
  MISC_FEATURE (6)..(6): X is K, R or H for basic amino acids
  MISC_FEATURE (7)..(7): X is A or G
  MISC_FEATURE (8)..(8): X is A or G
  MISC_FEATURE (9)..(9): X is I, L or V
  MISC_FEATURE (10)..(10): X is I, L or V
  MISC_FEATURE (11)..(11): X is C or S
  MISC_FEATURE (12)..(12): X is  Tor S
  MISC_FEATURE (13)..(13): X is A or G
  MISC_FEATURE (14)..(14): X is I, L or V
  MISC_FEATURE (15)..(15): X is I, L or V
  MISC_FEATURE (16)..(16): X is A or G
  MISC_FEATURE (17)..(17): X is A or G
  MISC_FEATURE (18)..(18): X is A or G
  MISC_FEATURE (19)..(19): X is D and E for acidic amino acids
  MISC_FEATURE (20)..(20): X is K, R or H for basic amino acids
  MISC_FEATURE (21)..(21): X is C or S
  MISC_FEATURE (22)..(22): X is T or S
  MISC_FEATURE (23)..(23): X is K, R or H for basic amino acids
  MISC_FEATURE (24)..(24): X is I, L or V
  MISC_FEATURE (25)..(25): X is I, L or V
  MISC_FEATURE (26)..(26): X is D and E for acidic amino acids
  MISC_FEATURE (27)..(27): X is F, W or Y for aromatic amino acids
  MISC_FEATURE (28)..(28): X is K, R or H for basic amino acids
XXXXXXXXXXXXXXXXXXXXXXXXXXXX

SEQ ID NO: 197 - protein, 31 aa, Artificial
  Completely synthesized peptide construct
DGQEEKAGVVSTGLIGGGIAGFKGEQGPKGE

SEQ ID NO: 198 - protein, 31 aa, Artificial; identical to SEQ ID NO: 130
  peptide construct
  MISC_FEATURE (1)..(1): X is D and E for acidic amino acids
  MISC_FEATURE (2)..(2): X is A or G
  MISC_FEATURE (3)..(3): X is N or Q for amidated amino acids
  MISC_FEATURE (4)..(4): X is D and E for acidic amino acids
  MISC_FEATURE (5)..(5): X is D and E for acidic amino acids
  MISC_FEATURE (6)..(6): X is K, R or H for basic amino acids
  MISC_FEATURE (7)..(7): X is A or G
  MISC_FEATURE (8)..(8): X is A or G
  MISC_FEATURE (9)..(9): X is I, L or V
  MISC_FEATURE (10)..(10): X is I, L or V
  MISC_FEATURE (11)..(11): X is C or S
  MISC_FEATURE (12)..(12): X is T or S
  MISC_FEATURE (13)..(13): X is A or G
  MISC_FEATURE (14)..(14): X is I, L or V
  MISC_FEATURE (15)..(15): X is I, L or V
  MISC_FEATURE (16)..(16): X is A or G
  MISC_FEATURE (17)..(17): X is A or G
  MISC_FEATURE (18)..(18): X is A or G
  MISC_FEATURE (19)..(19): X is I, L or V
  MISC_FEATURE (20)..(20): X is A or G
  MISC_FEATURE (21)..(21): X is A or G
  MISC_FEATURE (22)..(22): X is F, W or Y for aromatic amino acids
  MISC_FEATURE (23)..(23): X is K, R or H for basic amino acids
  MISC_FEATURE (24)..(24): X is A or G
  MISC_FEATURE (25)..(25): X is D and E for acidic amino acids
  MISC_FEATURE (26)..(26): X is N or Q for amidated amino acids
  MISC_FEATURE (27)..(27): X is A or G
  MISC_FEATURE (28)..(28): X is F or P
  MISC_FEATURE (29)..(29): X is K, R or H for basic amino acids
  MISC_FEATURE (30)..(30): X is A or G
  MISC_FEATURE (31)..(31): X is D and E for acidic amino acids

SEQ ID NO: 199 - protein, 1 aa, Artificial
  Completely synthesized peptide construct
  MISC_FEATURE (1)..(1): X is TEST TEST TEST TEST TEST
X

SEQ ID NO: 200 - protein, 18 aa, Artificial
  peptide construct
  MISC_FEATURE (1)..(1): X is D and E for acidic amino acids
  MISC_FEATURE (2)..(2): X is A or G
  MISC_FEATURE (3)..(3): X is N or Q for amidated amino acids
  MISC_FEATURE (4)..(4): X is D and E for acidic amino acids
  MISC_FEATURE (5)..(5): X is D and E for acidic amino acids
  MISC_FEATURE (6)..(6): X is K, R or H for basic amino acids
  MISC_FEATURE (7)..(7): X is A or G
  MISC_FEATURE (8)..(8): X is A or G
  MISC_FEATURE (9)..(9): X is I, L or V
  MISC_FEATURE (10)..(10): X is I, L or V
  MISC_FEATURE (11)..(11): X is C or S
  MISC_FEATURE (12)..(12): X is T or S
  MISC_FEATURE (13)..(13): X is A or G
  MISC_FEATURE (14)..(14): X is I, L or V
  MISC_FEATURE (15)..(15): X is I, L or V
  MISC_FEATURE (16)..(16): X is A or G
  MISC_FEATURE (17)..(17): X is A or G
  MISC_FEATURE (18)..(18): X is A or G
XXXXXXXXXXXXXXXXXX

SEQ ID NO: 201 - protein, 26 aa, Artificial
  Completely synthesized peptide construct
DGQEEKAGVVSTGLIGGGKNIVTPRT

SEQ ID NO: 202 - protein, 26 aa, Artificial
  peptide construct
  MISC_FEATURE (1)..(1): X is D and E for acidic amino acids
  MISC_FEATURE (2)..(2): X is A or G
  MISC_FEATURE (3)..(3): X is N or Q for amidated amino acids
  MISC_FEATURE (4)..(4): X is D and E for acidic amino acids
  MISC_FEATURE (5)..(5): X is D and E for acidic amino acids
  MISC_FEATURE (6)..(6): X is K, R or H for basic amino acids
  MISC_FEATURE (7)..(7): X is A or G
  MISC_FEATURE (8)..(8): X is A or G
  MISC_FEATURE (9)..(9): X is I, L or V
  MISC_FEATURE (10)..(10): X is I, L or V
  MISC_FEATURE (11)..(11): X is C or S
  MISC_FEATURE (12)..(12): X is T or S
  MISC_FEATURE (13)..(13): X is A or G
  MISC_FEATURE (14)..(14): X is I, L or V
  MISC_FEATURE (15)..(15): X is I, L or V
  MISC_FEATURE (16)..(16): X is A or G
  MISC_FEATURE (17)..(17): X is A or G
  MISC_FEATURE (18)..(18): X is A or G
  MISC_FEATURE (19)..(19): X is K, R or H for basic amino acids
  MISC_FEATURE (20)..(20): X is N or Q for amidated amino acids
  MISC_FEATURE (21)..(21): X is I, L or V
  MISC_FEATURE (22)..(22): X is I, L or V
  MISC_FEATURE (23)..(23): X is T or S
  MISC_FEATURE (24)..(24): X is F or P
  MISC_FEATURE (25)..(25): X is K, R or H for basic amino acids
  MISC_FEATURE (26)..(26): X is T or  S
XXXXXXXXXXXXXXXXXXXXXXXXXX

SEQ ID NO: 203 - protein, 33 aa, Artificial
  Completely synthesized peptide construct
DGQEEKAGVVSTGLIGGGGDKVSFFCKNKEKKC

SEQ ID NO: 204 - protein, 33 aa, Artificial; identical to SEQ ID NO: 99
  peptide construct
  MISC_FEATURE (1)..(1): X is D and E for acidic amino acids
  MISC_FEATURE (2)..(2): X is A or G
  MISC_FEATURE (3)..(3): X is N or Q for amidated amino acids
  MISC_FEATURE (4)..(4): X is D and E for acidic amino acids
  MISC_FEATURE (5)..(5): X is D and E for acidic amino acids
  MISC_FEATURE (6)..(6): X is K, R or H for basic amino acids
  MISC_FEATURE (7)..(7): X is A or G
  MISC_FEATURE (8)..(8): X is A or G
  MISC_FEATURE (9)..(9): X is I, L or V
  MISC_FEATURE (10)..(10): X is I, L or V
  MISC_FEATURE (11)..(11): X is C or S
  MISC_FEATURE (12)..(12): X is T or S
  MISC_FEATURE (13)..(13): X is A or G
  MISC_FEATURE (14)..(14): X is I, L or V
  MISC_FEATURE (15)..(15): X is I, L or V
  MISC_FEATURE (16)..(16): X is A or G
  MISC_FEATURE (17)..(17): X is A or G
  MISC_FEATURE (18)..(18): X is A or G
  MISC_FEATURE (19)..(19): X is A or G
  MISC_FEATURE (20)..(20): X is D and E for acidic amino acids
  MISC_FEATURE (21)..(21): X is K, R or H for basic amino acids
  MISC_FEATURE (22)..(22): X is I, L or V
  MISC_FEATURE (23)..(23): X is C or S
  MISC_FEATURE (24)..(24): X is F, W or Y for aromatic amino acids
  MISC_FEATURE (25)..(25): X is F, W or Y for aromatic amino acids
  MISC_FEATURE (26)..(26): X is C or S
  MISC_FEATURE (27)..(27): X is K, R or H for basic amino acids
  MISC_FEATURE (28)..(28): X is N or Q for amidated amino acids
  MISC_FEATURE (29)..(29): X is K, R or H for basic amino acids
  MISC_FEATURE (30)..(30): X is D and E for acidic amino acids
  MISC_FEATURE (31)..(31): X is K, R or H for basic amino acids
  MISC_FEATURE (32)..(32): X is K, R or H for basic amino acids
  MISC_FEATURE (33)..(33): X is C or S

SEQ ID NO: 205 - protein, 35 aa, Artificial
  Completely synthesized peptide construct
DGQEEKAGVVSTGLIGGGEIIVTHFPFDEQNCSMK

SEQ ID NO: 206 - protein, 35 aa, Artificial
  peptide construct
  MISC_FEATURE (1)..(1): X is D and E for acidic amino acids
  MISC_FEATURE (2)..(2): X is A or G
  MISC_FEATURE (3)..(3): X is N or Q for amidated amino acids
  MISC_FEATURE (4)..(4): X is D and E for acidic amino acids
  MISC_FEATURE (5)..(5): X is D and E for acidic amino acids
  MISC_FEATURE (6)..(6): X is K, R or H for basic amino acids
  MISC_FEATURE (7)..(7): X is A or G
  MISC_FEATURE (8)..(8): X is A or G
  MISC_FEATURE (9)..(9): X is I, L or V
  MISC_FEATURE (10)..(10): X is I, L or V
  MISC_FEATURE (11)..(11): X is C or S
  MISC_FEATURE (12)..(12): X is T or S
  MISC_FEATURE (13)..(13): X is A or G
  MISC_FEATURE (14)..(14): X is I, L or V
  MISC_FEATURE (15)..(15): X is I, L or V
  MISC_FEATURE (16)..(16): X is A or G
  MISC_FEATURE (17)..(17): X is A or G
  MISC_FEATURE (18)..(18): X is A or G
  MISC_FEATURE (19)..(19): X is D and E for acidic amino acids
  MISC_FEATURE (20)..(20): X is I, L or V
  MISC_FEATURE (21)..(21): X is I, L or V
  MISC_FEATURE (22)..(22): X is I, L or V
  MISC_FEATURE (23)..(23): X is T or S
  MISC_FEATURE (24)..(24): X is K, R or H for basic amino acids
  MISC_FEATURE (25)..(25): X is F, W or Y for aromatic amino acids
  MISC_FEATURE (26)..(26): X is F or P
  MISC_FEATURE (27)..(27): X is F, W or Y for aromatic amino acids
  MISC_FEATURE (28)..(28): X is D and E for acidic amino acids
  MISC_FEATURE (29)..(29): X is D and E for acidic amino acids
  MISC_FEATURE (30)..(30): X is N or Q for amidated amino acids
  MISC_FEATURE (31)..(31): X is N or Q for amidated amino acids
  MISC_FEATURE (32)..(32): X is C or S
  MISC_FEATURE (33)..(33): X is C or S
  MISC_FEATURE (34)..(34): X is M or Nle
  MISC_FEATURE (35)..(35): X is K, R or H for basic  amino acids
XXXXXXXXXXXXXXXXXXXXXXXXXXXXXXXXXXX

SEQ ID NO: 207 - protein, 31 aa, Artificial
  Completely synthesized peptide construct
DGQEEKAGVVSTGLIGGGVHFFKNIVTPRTP

SEQ ID NO: 208 - protein, 31 aa, Artificial; identical to SEQ ID NO: 130
  peptide construct
  MISC_FEATURE (1)..(1): X is D and E for acidic amino acids
  MISC_FEATURE (2)..(2): X is A or G
  MISC_FEATURE (3)..(3): X is N or Q for amidated amino acids
  MISC_FEATURE (4)..(4): X is D and E for acidic amino acids
  MISC_FEATURE (5)..(5): X is D and E for acidic amino acids
  MISC_FEATURE (6)..(6): X is K, R or H for basic amino acids
  MISC_FEATURE (7)..(7): X is A or G
  MISC_FEATURE (8)..(8): X is A or G
  MISC_FEATURE (9)..(9): X is I, L or V
  MISC_FEATURE (10)..(10): X is I, L or V
  MISC_FEATURE (11)..(11): X is C or S
  MISC_FEATURE (12)..(12): X is T or S
  MISC_FEATURE (13)..(13): X is A or G
  MISC_FEATURE (14)..(14): X is I, L or V
  MISC_FEATURE (15)..(15): X is I, L or V
  MISC_FEATURE (16)..(16): X is A or G
  MISC_FEATURE (17)..(17): X is A or G
  MISC_FEATURE (18)..(18): X is A or G
  MISC_FEATURE (19)..(19): X is I, L or V
  MISC_FEATURE (20)..(20): X is K, R or H for basic amino acids
  MISC_FEATURE (21)..(21): X is F, W or Y for aromatic amino acids
  MISC_FEATURE (22)..(22): X is F, W or Y for aromatic amino acids
  MISC_FEATURE (23)..(23): X is K,  R or H for basic amino acids
  MISC_FEATURE (24)..(24): X is N or Q for amidated amino acids
  MISC_FEATURE (25)..(25): X is I, L or V
  MISC_FEATURE (26)..(26): X is I, L or V
  MISC_FEATURE (27)..(27): X is T or S
  MISC_FEATURE (28)..(28): X is F or P
  MISC_FEATURE (29)..(29): X is K, R or H for basic amino acids
  MISC_FEATURE (30)..(30): X is T or S
  MISC_FEATURE (31)..(31): X is F or P

SEQ ID NO: 209 - protein, 35 aa, Artificial
  Completely synthesized peptide construct
DGQEEKAGVVSTGLIGGGYQQLNSERGVPNENIEN

SEQ ID NO: 210 - protein, 35 aa, Artificial; identical to SEQ ID NO: 206
  peptide construct
  MISC_FEATURE (1)..(1): X is D and E for acidic amino acids
  MISC_FEATURE (2)..(2): X is A or G
  MISC_FEATURE (3)..(3): X is N or Q for amidated amino acids
  MISC_FEATURE (4)..(4): X is D and E for acidic amino acids
  MISC_FEATURE (5)..(5): X is D and E for acidic amino acids
  MISC_FEATURE (6)..(6): X is K, R or H for basic amino acids
  MISC_FEATURE (7)..(7): X is A or G
  MISC_FEATURE (8)..(8): X is A or G
  MISC_FEATURE (9)..(9): X is I, L or V
  MISC_FEATURE (10)..(10): X is I, L or V
  MISC_FEATURE (11)..(11): X is C or S
  MISC_FEATURE (12)..(12): X is T or S
  MISC_FEATURE (13)..(13): X is A or G
  MISC_FEATURE (14)..(14): X is I, L or V
  MISC_FEATURE (15)..(15): X is I, L or V
  MISC_FEATURE (16)..(16): X is A or G
  MISC_FEATURE (17)..(17): X is A or G
  MISC_FEATURE (18)..(18): X is A or G
  MISC_FEATURE (19)..(19): X is F, W or Y for aromatic amino acids
  MISC_FEATURE (20)..(20): X is N or Q for amidated amino acids
  MISC_FEATURE (21)..(21): X is N or Q for amidated amino acids
  MISC_FEATURE (22)..(22): X is I, L or V
  MISC_FEATURE (23)..(23): X is N or Q for amidated amino acids
  MISC_FEATURE (24)..(24): X is C or S
  MISC_FEATURE (25)..(25): X is D and E for acidic amino acids
  MISC_FEATURE (26)..(26): X is K, R or H for basic amino acids
  MISC_FEATURE (27)..(27): X is A or G
  MISC_FEATURE (28)..(28): X is I, L or V
  MISC_FEATURE (29)..(29): X is F or P
  MISC_FEATURE (30)..(30): X is N or Q for amidated amino acids
  MISC_FEATURE (31)..(31): X is D and E for acidic amino acids
  MISC_FEATURE (32)..(32): X is N or Q for amidated amino acids
  MISC_FEATURE (33)..(33): X is I, L or V
  MISC_FEATURE (34)..(34): X is D and E for acidic amino acids
  MISC_FEATURE (35)..(35): X is N or Q for amidated amino acids

SEQ ID NO: 211 - protein, 31 aa, Artificial
  Completely synthesized peptide construct
DGQEEKAGVVSTGLIGGGVFIKRVSNVIIHG

SEQ ID NO: 212 - protein, 31 aa, Artificial; identical to SEQ ID NO: 130
  peptide construct
  MISC_FEATURE (1)..(1): X is D and E for acidic amino acids
  MISC_FEATURE (2)..(2): X is A or G
  MISC_FEATURE (3)..(3): X is N or Q for amidated amino acids
  MISC_FEATURE (4)..(4): X is D and E for acidic amino acids
  MISC_FEATURE (5)..(5): X is D and E for acidic amino acids
  MISC_FEATURE (6)..(6): X is K, R or H for basic amino acids
  MISC_FEATURE (7)..(7): X is A or G
  MISC_FEATURE (8)..(8): X is A or G
  MISC_FEATURE (9)..(9): X is I, L or V
  MISC_FEATURE (10)..(10): X is I, L or V
  MISC_FEATURE (11)..(11): X is C or S
  MISC_FEATURE (12)..(12): X is T or S
  MISC_FEATURE (13)..(13): X is A or G
  MISC_FEATURE (14)..(14): X is I, L or V
  MISC_FEATURE (15)..(15): X is I, L or V
  MISC_FEATURE (16)..(16): X is A or G
  MISC_FEATURE (17)..(17): X is A or G
  MISC_FEATURE (18)..(18): X is A or G
  MISC_FEATURE (19)..(19): X is I, L or V
  MISC_FEATURE (20)..(20): X is F, W or Y for aromatic amino acids
  MISC_FEATURE (21)..(21): X is I, L or V
  MISC_FEATURE (22)..(22): X is K, R or H for basic amino acids
  MISC_FEATURE (23)..(23): X is K, R or H for basic amino acids
  MISC_FEATURE (24)..(24): X is I, L or V
  MISC_FEATURE (25)..(25): X is C or S
  MISC_FEATURE (26)..(26): X is N or Q for amidated amino acids
  MISC_FEATURE (27)..(27): X is I, L or V
  MISC_FEATURE (28)..(28): X is I, L or V
  MISC_FEATURE (29)..(29): X is I, L or V
  MISC_FEATURE (30)..(30): X is K, R or H for basic amino acids
  MISC_FEATURE (31)..(31): X is A or G

SEQ ID NO: 213 - protein, 33 aa, Artificial
  Completely synthesized peptide construct
DGQEEKAGVVSTGLIGGGMKVTVAFNQFGPNRR

SEQ ID NO: 214 - protein, 33 aa, Artificial; identical to SEQ ID NO: 99
  peptide construct
  MISC_FEATURE (1)..(1): X is D and E for acidic amino acids
  MISC_FEATURE (2)..(2): X is A or G
  MISC_FEATURE (3)..(3): X is N or Q for amidated amino acids
  MISC_FEATURE (4)..(4): X is D and E for acidic amino acids
  MISC_FEATURE (5)..(5): X is D and E for acidic amino acids
  MISC_FEATURE (6)..(6): X is K, R or H for basic amino acids
  MISC_FEATURE (7)..(7): X is A or G
  MISC_FEATURE (8)..(8): X is A or G
  MISC_FEATURE (9)..(9): X is I, L or V
  MISC_FEATURE (10)..(10): X is I, L or V
  MISC_FEATURE (11)..(11): X is C or S
  MISC_FEATURE (12)..(12): X is T or S
  MISC_FEATURE (13)..(13): X is A or G
  MISC_FEATURE (14)..(14): X is I, L or V
  MISC_FEATURE (15)..(15): X is I, L or V
  MISC_FEATURE (16)..(16): X is A or G
  MISC_FEATURE (17)..(17): X is A or G
  MISC_FEATURE (18)..(18): X is A or G
  MISC_FEATURE (19)..(19): X is M or Nle
  MISC_FEATURE (20)..(20): X is K, R or H for basic amino acids
  MISC_FEATURE (21)..(21): X is I, L or V
  MISC_FEATURE (22)..(22): X is T or S
  MISC_FEATURE (23)..(23): X is I, L or V
  MISC_FEATURE (24)..(24): X is A or G
  MISC_FEATURE (25)..(25): X is F, W or Y for aromatic amino acids
  MISC_FEATURE (26)..(26): X is N or Q for amidated amino acids
  MISC_FEATURE (27)..(27): X is N or Q for amidated amino acids
  MISC_FEATURE (28)..(28): X is F, W or Y for aromatic amino acids
  MISC_FEATURE (29)..(29): X is A or G
  MISC_FEATURE (30)..(30): X is F or P
  MISC_FEATURE (31)..(31): X is N or Q for amidated amino acids
  MISC_FEATURE (32)..(32): X is K, R or H for basic amino acids
  MISC_FEATURE (33)..(33): X is K, R or H for basic amino acids

SEQ ID NO: 215 - protein, 33 aa, Artificial
  Completely synthesized peptide construct
DGQEEKAGVVSTGLIGGGIASRRVDGIIAAYQN

SEQ ID NO: 216 - protein, 33 aa, Artificial; identical to SEQ ID NO: 99
  peptide construct
  MISC_FEATURE (1)..(1): X is D and E for acidic amino acids
  MISC_FEATURE (2)..(2): X is A or G
  MISC_FEATURE (3)..(3): X is N or Q for amidated amino acids
  MISC_FEATURE (4)..(4): X is D and E for acidic amino acids
  MISC_FEATURE (5)..(5): X is D and E for acidic amino acids
  MISC_FEATURE (6)..(6): X is K, R or H for basic amino acids
  MISC_FEATURE (7)..(7): X is A or G
  MISC_FEATURE (8)..(8): X is A or G
  MISC_FEATURE (9)..(9): X is I, L or V
  MISC_FEATURE (10)..(10): X is I, L or V
  MISC_FEATURE (11)..(11): X is C or S
  MISC_FEATURE (12)..(12): X is T or S
  MISC_FEATURE (13)..(13): X is A or G
  MISC_FEATURE (14)..(14): X is I, L or V
  MISC_FEATURE (15)..(15): X is I, L or V
  MISC_FEATURE (16)..(16): X is A or G
  MISC_FEATURE (17)..(17): X is A or G
  MISC_FEATURE (18)..(18): X is A or G
  MISC_FEATURE (19)..(19): X is I, L or V
  MISC_FEATURE (20)..(20): X is A or G
  MISC_FEATURE (21)..(21): X is C or S
  MISC_FEATURE (22)..(22): X is K, Ror H for basic amino acids
  MISC_FEATURE (23)..(23): X is K, R or H for basic amino acids
  MISC_FEATURE (24)..(24): X is I, L or V
  MISC_FEATURE (25)..(25): X is D and E for acidic amino acids
  MISC_FEATURE (26)..(26): X is A or G
  MISC_FEATURE (27)..(27): X is I, L or V
  MISC_FEATURE (28)..(28): X is I, L or V
  MISC_FEATURE (29)..(29): X is A or G
  MISC_FEATURE (30)..(30): X is A or G
  MISC_FEATURE (31)..(31): X is F, W or Y for aromatic amino acids
  MISC_FEATURE (32)..(32): X is N or Q for amidated amino acids
  MISC_FEATURE (33)..(33): X is N or Q for amidated amino acids

SEQ ID NO: 217 - protein, 38 aa, Artificial
  Completely synthesized peptide construct
DGQEEKAGVVSTGLIGGGGIDIFASKNFHLQKNTIGTG

SEQ ID NO: 218 - protein, 37 aa, Artificial; identical to SEQ ID NO: 158
  peptide construct
  MISC_FEATURE (1)..(1): X is D and E for acidic amino acids
  MISC_FEATURE (2)..(2): X is A or G
  MISC_FEATURE (3)..(3): X is N or Q for amidated amino acids
  MISC_FEATURE (4)..(4): X is D and E for acidic amino acids
  MISC_FEATURE (5)..(5): X is D and E for acidic amino acids
  MISC_FEATURE (6)..(6): X is K, R or H for basic amino acids
  MISC_FEATURE (7)..(7): X is A or G
  MISC_FEATURE (8)..(8): X is A or G
  MISC_FEATURE (9)..(9): X is I, L or V
  MISC_FEATURE (10)..(10): X is I, L or V
  MISC_FEATURE (11)..(11): X is C or S
  MISC_FEATURE (12)..(12): X is T or S
  MISC_FEATURE (13)..(13): X is A or G
  MISC_FEATURE (14)..(14): X is I, L or V
  MISC_FEATURE (15)..(15): X is I, L or V
  MISC_FEATURE (16)..(16): X is A or G
  MISC_FEATURE (17)..(17): X is A or G
  MISC_FEATURE (18)..(18): X is A or G
  MISC_FEATURE (19)..(19): X is I, L or V
  MISC_FEATURE (20)..(20): X is D and E for acidic amino acids
  MISC_FEATURE (21)..(21): X is I, L or V
  MISC_FEATURE (22)..(22): X is F, W or Y for aromatic amino acids
  MISC_FEATURE (23)..(23): X is A or G
  MISC_FEATURE (24)..(24): X is C or S
  MISC_FEATURE (25)..(25): X is K, R or H for basic amino acids
  MISC_FEATURE (26)..(26): X is N or Q for amidated amino acids
  MISC_FEATURE (27)..(27): X is F, W or Y for aromatic amino acids
  MISC_FEATURE (28)..(28): X is K, R or H for basic amino acids
  MISC_FEATURE (29)..(29): X is I, L or V
  MISC_FEATURE (30)..(30): X is N or Q for amidated amino acids
  MISC_FEATURE (31)..(31): X is K, R or H for basic amino acids
  MISC_FEATURE (32)..(32): X is N or Q for amidated amino acids
  MISC_FEATURE (33)..(33): X is T or S
  MISC_FEATURE (34)..(34): X is I, L or V
  MISC_FEATURE (35)..(35): X is A or G
  MISC_FEATURE (36)..(36): X is T or S
  MISC_FEATURE (37)..(37): X is A or G

SEQ ID NO: 219 - protein, 43 aa, Artificial
  Completely synthesized peptide construct
DGQEEKAGVVSTGLIGGGGIGAVLKVLTTGPALISWIKRKRQQ

SEQ ID NO: 220 - protein, 43 aa, Artificial
  peptide construct
  MISC_FEATURE (1)..(1): X is D and E for acidic amino acids
  MISC_FEATURE (2)..(2): X is A or G
  MISC_FEATURE (3)..(3): X is N or Q for amidated amino acids
  MISC_FEATURE (4)..(4): X is D and E for acidic amino acids
  MISC_FEATURE (5)..(5): X is D and E for acidic amino acids
  MISC_FEATURE (6)..(6): X is K, R or H for basic amino acids
  MISC_FEATURE (7)..(7): X is A or G
  MISC_FEATURE (8)..(8): X is A or G
  MISC_FEATURE (9)..(9): X is I, L or V
  MISC_FEATURE (10)..(10): X is I, L or V
  MISC_FEATURE (11)..(11): X is C or S
  MISC_FEATURE (12)..(12): X is T or S
  MISC_FEATURE (13)..(13): X is A or G
  MISC_FEATURE (14)..(14): X is I, L or V
  MISC_FEATURE (15)..(15): X is I, L or V
  MISC_FEATURE (16)..(16): X is A or G
  MISC_FEATURE (17)..(17): X is A or G
  MISC_FEATURE (18)..(18): X is A or G
  MISC_FEATURE (19)..(19): X is A or G
  MISC_FEATURE (20)..(20): X is I, L or V
  MISC_FEATURE (21)..(21): X is A or G
  MISC_FEATURE (22)..(22): X is A or G
  MISC_FEATURE (23)..(23): X is I, L or V
  MISC_FEATURE (24)..(24): X is I, L or V
  MISC_FEATURE (25)..(25): X is K, R or H for basic amino acids
  MISC_FEATURE (26)..(26): X is I, L or V
  MISC_FEATURE (27)..(27): X is I, L or V
  MISC_FEATURE (28)..(28): X is T or S
  MISC_FEATURE (29)..(29): X is T or S
  MISC_FEATURE (30)..(30): X is A or G
  MISC_FEATURE (31)..(31): X is F or P
  MISC_FEATURE (32)..(32): X is A or G
  MISC_FEATURE (33)..(33): X is I, L or V
  MISC_FEATURE (34)..(34): X is I, L or V
  MISC_FEATURE (35)..(35): X is C or S
  MISC_FEATURE (36)..(36): X is F, W or Y for aromatic amino acids
  MISC_FEATURE (37)..(37): X is I, L or V
  MISC_FEATURE (38)..(38): X is K, R or H for basic amino acids
  MISC_FEATURE (39)..(39): X is K, R or H for basic amino acids
  MISC_FEATURE (40)..(40): X is K, R or H for basic amino acids
  MISC_FEATURE (41)..(41): X is K, R or H for basic amino acids
  MISC_FEATURE (42)..(42): X is N or Q for amidated amino acids
  MISC_FEATURE (43)..(43): X is N or Q for amidated amino acids
XXXXXXXXXXXXXXXXXXXXXXXXXXXXXXXXXXXXXXXXXXX

SEQ ID NO: 221 - protein, 58 aa, Artificial
  Completely synthesized peptide construct
DAEFRHDSGYEVHHQKLVFFAEDVGSKNGAIIGLMVGGVVGGGDGQEEKAGVVSTGLI

SEQ ID NO: 222 - protein, 58 aa, Artificial; identical to SEQ ID NO: 142
  peptide construct
  MISC_FEATURE (1)..(1): X is D and E for acidic amino acids
  MISC_FEATURE (2)..(2): X is A or G
  MISC_FEATURE (3)..(3): X is D and E for acidic amino acids
  MISC_FEATURE (4)..(4): X is F, W or Y for aromatic amino acids
  MISC_FEATURE (5)..(5): X is K, R or H for basic amino acids
  MISC_FEATURE (6)..(6): X is K, R or H for basic amino acids
  MISC_FEATURE (7)..(7): X is D and E for acidic amino acids
  MISC_FEATURE (8)..(8): X is T or S
  MISC_FEATURE (9)..(9): X is A or G
  MISC_FEATURE (10)..(10): X is F,  W or Y for aromatic amino acids
  MISC_FEATURE (11)..(11): X is D and E for acidic amino acids
  MISC_FEATURE (12)..(12): X is I, L or V
  MISC_FEATURE (13)..(13): X is K, R or H for basic amino acids
  MISC_FEATURE (14)..(14): X is K, R or H for basic amino acids
  MISC_FEATURE (15)..(15): X is N or Q for amidated amino acids
  MISC_FEATURE (16)..(16): X is K, R or H for basic amino acids
  MISC_FEATURE (17)..(17): X is I, L or V
  MISC_FEATURE (18)..(18): X is I, L or V
  MISC_FEATURE (19)..(19): X is F, W or Y for aromatic amino acids
  MISC_FEATURE (20)..(20): X is F, W or Y for aromatic amino acids
  MISC_FEATURE (21)..(21): X is A or G
  MISC_FEATURE (22)..(22): X is D and E for acidic amino acids
  MISC_FEATURE (23)..(23): X is D and E for acidic amino acids
  MISC_FEATURE (24)..(24): X is I, L or V
  MISC_FEATURE (25)..(25): X is A or G
  MISC_FEATURE (26)..(26): X is C or S
  MISC_FEATURE (27)..(27): X is N or Q for amidated amino acids
  MISC_FEATURE (28)..(28): X is K, R or H for basic amino acids
  MISC_FEATURE (29)..(29): X is A or G
  MISC_FEATURE (30)..(30): X is A or G
  MISC_FEATURE (31)..(31): X is I, L or V
  MISC_FEATURE (32)..(32): X is I, L or V
  MISC_FEATURE (33)..(33): X is A or G
  MISC_FEATURE (34)..(34): X is I, L or V
  MISC_FEATURE (35)..(35): X is M or Nle
  MISC_FEATURE (36)..(36): X is I, L or V
  MISC_FEATURE (37)..(37): X is A or G
  MISC_FEATURE (38)..(38): X is A or G
  MISC_FEATURE (39)..(39): X is I, L or V
  MISC_FEATURE (40)..(40): X is I, L or V
  MISC_FEATURE (41)..(41): X is A and G
  MISC_FEATURE (42)..(42): X is A or G
  MISC_FEATURE (43)..(43): X is A and G
  MISC_FEATURE (44)..(44): X is D and E for acidic amino acids
  MISC_FEATURE (45)..(45): X is A and G
  MISC_FEATURE (46)..(46): X is N or Q for amidated amino acids
  MISC_FEATURE (47)..(47): X is D and E for acidic amino acids
  MISC_FEATURE (48)..(48): X is D and E for acidic amino acids
  MISC_FEATURE (49)..(49): X is K, R or H for basic amino acids
  MISC_FEATURE (50)..(50): X is A and G
  MISC_FEATURE (51)..(51): X is A and G
  MISC_FEATURE (52)..(52): X is I, L or V
  MISC_FEATURE (53)..(53): X is I, L or V
  MISC_FEATURE (54)..(54): X is C or S
  MISC_FEATURE (55)..(55): X is T or S
  MISC_FEATURE (56)..(56): X is A and G
  MISC_FEATURE (57)..(57): X is I, L or V
  MISC_FEATURE (58)..(58): X is I, L or V

SEQ ID NO: 223 - protein, 46 aa, Artificial
  Completely synthesized peptide construct
DAEFRHDSGYEVHHQKLVFFAENVGSNKGGGDGQEEKAGVVSTGLI

SEQ ID NO: 224 - protein, 46 aa, Artificial; identical to SEQ ID NO: 144
  peptide construct
  MISC_FEATURE (1)..(1): X is D and E for acidic amino acids
  MISC_FEATURE (2)..(2): X is A or G
  MISC_FEATURE (3)..(3): X is D and E for acidic amino acids
  MISC_FEATURE (4)..(4): X is F, W or Y for aromatic amino acids
  MISC_FEATURE (5)..(5): X is K, R or H for basic amino acids
  MISC_FEATURE (6)..(6): X is K, R or H for basic amino acids
  MISC_FEATURE (7)..(7): X is D and E for acidic amino acids
  MISC_FEATURE (8)..(8): X is Tor S
  MISC_FEATURE (9)..(9): X is A or G
  MISC_FEATURE (10)..(10): X is F, W or Y for aromatic amino acids
  MISC_FEATURE (11)..(11): X is D and E for acidic amino acids
  MISC_FEATURE (12)..(12): X is I, L or V
  MISC_FEATURE (13)..(13): X is K, R or H for basic amino acids
  MISC_FEATURE (14)..(14): X is K, R or H for basic amino acids
  MISC_FEATURE (15)..(15): X is N or Q for amidated amino acids
  MISC_FEATURE (16)..(16): X is K, R or H for basic amino acids
  MISC_FEATURE (17)..(17): X is I, L or V
  MISC_FEATURE (18)..(18): X is I, L or V
  MISC_FEATURE (19)..(19): X is F, W or Y for aromatic amino acids
  MISC_FEATURE (20)..(20): X is F, W or Y for aromatic amino acids
  MISC_FEATURE (21)..(21): X is A or G
  MISC_FEATURE (22)..(22): X is D and E for acidic amino acids
  MISC_FEATURE (23)..(23): X is D and E for acidic amino acids
  MISC_FEATURE (24)..(24): X is I, L or V
  MISC_FEATURE (25)..(25): X is A or G
  MISC_FEATURE (26)..(26): X is C or S
  MISC_FEATURE (27)..(27): X is N or Q for amidated amino acids
  MISC_FEATURE (28)..(28): X is K, R or H for basic amino acids
  MISC_FEATURE (29)..(29): X is A and G
  MISC_FEATURE (30)..(30): X is A or G
  MISC_FEATURE (31)..(31): X is A and G
  MISC_FEATURE (32)..(32): X is D and E for acidic amino acids
  MISC_FEATURE (33)..(33): X is A and G
  MISC_FEATURE (34)..(34): X is N or Q for amidated amino acids
  MISC_FEATURE (35)..(35): X is D and E for acidic amino acids
  MISC_FEATURE (36)..(36): X is D and E for acidic amino acids
  MISC_FEATURE (37)..(37): X is K, R or H for basic amino acids
  MISC_FEATURE (38)..(38): X is A andG
  MISC_FEATURE (39)..(39): X is A and G
  MISC_FEATURE (40)..(40): X is I, L or V
  MISC_FEATURE (41)..(41): X is I, L or V
  MISC_FEATURE (42)..(42): X is C or S
  MISC_FEATURE (43)..(43): X is T or S
  MISC_FEATURE (44)..(44): X is A or G
  MISC_FEATURE (45)..(45): X is I, L or V
  MISC_FEATURE (46)..(46): X is I, L or V

SEQ ID NO: 225 - protein, 48 aa, Artificial
  Completely synthesized peptide construct
DAEFRHDSGYEVHHQKLVFFAENVGSNKAIGGGDGQEEKAGVVSTGLI

SEQ ID NO: 226 - protein, 48 aa, Artificial; identical to SEQ ID NO: 146
  peptide construct
  MISC_FEATURE (1)..(1): X is D and E for acidic amino acids
  MISC_FEATURE (2)..(2): X is A or G
  MISC_FEATURE (3)..(3): X is D and E for acidic amino acids
  MISC_FEATURE (4)..(4): X is F, W or Y for aromatic amino acids
  MISC_FEATURE (5)..(5): X is K, R or H for basic amino acids
  MISC_FEATURE (6)..(6): X is K, R or H for basic amino acids
  MISC_FEATURE (7)..(7): X is D and E for acidic amino acids
  MISC_FEATURE (8)..(8): X is T or S
  MISC_FEATURE (9)..(9): X is A or G
  MISC_FEATURE (10)..(10): X is F, W or Y for aromatic amino acids
  MISC_FEATURE (11)..(11): X is D and E for acidic amino acids
  MISC_FEATURE (12)..(12): X is I, L or V
  MISC_FEATURE (13)..(13): X is K, R or H for basic amino acids
  MISC_FEATURE (14)..(14): X is K, R or H for basic amino acids
  MISC_FEATURE (15)..(15): X is N or Q for amidated amino acids
  MISC_FEATURE (16)..(16): X is K, R or H for basic amino acids
  MISC_FEATURE (17)..(17): X is I, L or V
  MISC_FEATURE (18)..(18): X is I, L or V
  MISC_FEATURE (19)..(19): X is F, W or Y for aromatic amino acids
  MISC_FEATURE (20)..(20): X is F, W or Y for aromatic amino acids
  MISC_FEATURE (21)..(21): X is A or G
  MISC_FEATURE (22)..(22): X is D and E for acidic amino acids
  MISC_FEATURE (23)..(23): X is D and E for acidic amino acids
  MISC_FEATURE (24)..(24): X is I, L or V
  MISC_FEATURE (25)..(25): X is A or G
  MISC_FEATURE (26)..(26): X is C or S
  MISC_FEATURE (27)..(27): X is N or Q for amidated amino acids
  MISC_FEATURE (28)..(28): X is K, R or H for basic amino acids
  MISC_FEATURE (29)..(29): X is A  or G
  MISC_FEATURE (30)..(30): X is I, L or V
  MISC_FEATURE (31)..(31): X is A and G
  MISC_FEATURE (32)..(32): X is A or G
  MISC_FEATURE (33)..(33): X is A and G
  MISC_FEATURE (34)..(34): X is D and E for acidic amino acids
  MISC_FEATURE (35)..(35): X is A and G
  MISC_FEATURE (36)..(36): X is  N or Q for amidated amino acids
  MISC_FEATURE (37)..(37): X is D and E for acidic amino acids
  MISC_FEATURE (38)..(38): X is D and E for acidic amino acids
  MISC_FEATURE (39)..(39): X is K, R or H for basic amino acids
  MISC_FEATURE (40)..(40): X is A and G
  MISC_FEATURE (41)..(41): X is A and G
  MISC_FEATURE (42)..(42): X is I, L or V
  MISC_FEATURE (43)..(43): X is I, L or V
  MISC_FEATURE (44)..(44): X is C or S
  MISC_FEATURE (45)..(45): X is T or S
  MISC_FEATURE (46)..(46): X is A or G
  MISC_FEATURE (47)..(47): X is I, L or V
  MISC_FEATURE (48)..(48): X is I, L or V

SEQ ID NO: 227 - protein, 29 aa, Artificial
  Completely synthesized peptide construct
DAEFRHDSGYEGGGDGQEEKAGVVSTGLI

SEQ ID NO: 228 - protein, 29 aa, Artificial
  peptide construct
  MISC_FEATURE (1)..(1): X is D and E for acidic amino acids
  MISC_FEATURE (2)..(2): X is A or G
  MISC_FEATURE (3)..(3): X is D and E for acidic amino acids
  MISC_FEATURE (4)..(4): X is F, W or Y for aromatic amino acids
  MISC_FEATURE (5)..(5): X is K, R or H for basic amino acids
  MISC_FEATURE (6)..(6): X is K, R or H for basic amino acids
  MISC_FEATURE (7)..(7): X is D and E for acidic amino acids
  MISC_FEATURE (8)..(8): X is T or S
  MISC_FEATURE (9)..(9): X is A or G
  MISC_FEATURE (10)..(10): X is F, W or Y for aromatic amino acids
  MISC_FEATURE (11)..(11): X is D and E for acidic amino acids
  MISC_FEATURE (12)..(12): X is A and G
  MISC_FEATURE (13)..(13): X is A or G
  MISC_FEATURE (14)..(14): X is A and G
  MISC_FEATURE (15)..(15): X is D and E for acidic amino acids
  MISC_FEATURE (16)..(16): X is A and G
  MISC_FEATURE (17)..(17): X is N or Q for amidated amino acids
  MISC_FEATURE (18)..(18): X is D and E for acidic amino acids
  MISC_FEATURE (19)..(19): X is D and E for acidic amino acids
  MISC_FEATURE (20)..(20): X is K, R or H for basic amino acids
  MISC_FEATURE (21)..(21): X is A and G
  MISC_FEATURE (22)..(22): X is A and G
  MISC_FEATURE (23)..(23): X is I, L or V
  MISC_FEATURE (24)..(24): X is I, L or V
  MISC_FEATURE (25)..(25): X is C or S
  MISC_FEATURE (26)..(26): X is T or S
  MISC_FEATURE (27)..(27): X is A or G
  MISC_FEATURE (28)..(28): X is I, L or V
  MISC_FEATURE (29)..(29): X is I, L or V
XXXXXXXXXXXXXXXXXXXXXXXXXXXXX

SEQ ID NO: 229 - protein, 25 aa, Artificial
  Completely synthesized peptide construct
EVNGSNKGGGDGQEEKAGVVSTGLI

SEQ ID NO: 230 - protein, 25 aa, Artificial
  peptide construct
  MISC_FEATURE (1)..(1): X is Dand E for acidic amino acids
  MISC_FEATURE (2)..(2): X is Dand E for acidic amino acids
  MISC_FEATURE (3)..(3): X is I, L or V
  MISC_FEATURE (4)..(4): X is A or G
  MISC_FEATURE (5)..(5): X is C or S
  MISC_FEATURE (6)..(6): X is N or Q for amidated amino acids
  MISC_FEATURE (7)..(7): X is K, R or H for basic amino acids
  MISC_FEATURE (8)..(8): X is A and G
  MISC_FEATURE (9)..(9): X is A or G
  MISC_FEATURE (10)..(10): X is A and G
  MISC_FEATURE (11)..(11): X is D and E for acidic amino acids
  MISC_FEATURE (12)..(12): X is A and G
  MISC_FEATURE (13)..(13): X is N or Q for amidated amino acids
  MISC_FEATURE (14)..(14): X is D andE for acidic amino acids
  MISC_FEATURE (15)..(15): X is D and E for acidic amino acids
  MISC_FEATURE (16)..(16): X is K, R or H for basic amino acids
  MISC_FEATURE (17)..(17): X is A and G
  MISC_FEATURE (18)..(18): X is A and G
  MISC_FEATURE (19)..(19): X is I, L or V
  MISC_FEATURE (20)..(20): X is I, L or V
  MISC_FEATURE (21)..(21): X is C or S
  MISC_FEATURE (22)..(22): X is T or S
  MISC_FEATURE (23)..(23): X is A  or G
  MISC_FEATURE (24)..(24): X is I, L or V
  MISC_FEATURE (25)..(25): X is I, L or V
XXXXXXXXXXXXXXXXXXXXXXXXX

SEQ ID NO: 231 - protein, 30 aa, Artificial
  Completely synthesized peptide construct
DAEFRHDSGYEVGGGDGQEEKAGVVSTGLI

SEQ ID NO: 232 - protein, 30 aa, Artificial; identical to SEQ ID NO: 58
  peptide construct
  MISC_FEATURE (1)..(1): X is D and E for acidic amino acids
  MISC_FEATURE (2)..(2): X is A or G
  MISC_FEATURE (3)..(3): X is D and E for acidic amino acids
  MISC_FEATURE (4)..(4): X is F, W or Y for aromatic amino acids
  MISC_FEATURE (5)..(5): X is K, R or H for basic amino acids
  MISC_FEATURE (6)..(6): X is K, R or H for basic amino acids
  MISC_FEATURE (7)..(7): X is D and E for acidic amino acids
  MISC_FEATURE (8)..(8): X is T or S
  MISC_FEATURE (9)..(9): X is A or G
  MISC_FEATURE (10)..(10): X is F, W or Y for aromatic amino acids
  MISC_FEATURE (11)..(11): X is D and E for acidic amino acids
  MISC_FEATURE (12)..(12): X is I, L or V
  MISC_FEATURE (13)..(13): X is A and G
  MISC_FEATURE (14)..(14): X is A or G
  MISC_FEATURE (15)..(15): X is A and G
  MISC_FEATURE (16)..(16): X is D and E for acidic amino acids
  MISC_FEATURE (17)..(17): X is A and G
  MISC_FEATURE (18)..(18): X is N or Q for amidated amino acids
  MISC_FEATURE (19)..(19): X is D and E for acidic amino acids
  MISC_FEATURE (20)..(20): X is D and E for acidic amino acids
  MISC_FEATURE (21)..(21): X is K, R or H for basic amino acids
  MISC_FEATURE (22)..(22): X is A and G
  MISC_FEATURE (23)..(23): X is A and G
  MISC_FEATURE (24)..(24): X is I, L or V
  MISC_FEATURE (25)..(25): X is I, L or V
  MISC_FEATURE (26)..(26): X is C or S
  MISC_FEATURE (27)..(27): X is T or S
  MISC_FEATURE (28)..(28): X is A or G
  MISC_FEATURE (29)..(29): X is I, L or V
  MISC_FEATURE (30)..(30): X is I, L or V

SEQ ID NO: 233 - protein, 28 aa, Artificial
  Completely synthesized peptide construct
DAEFRHDSGYGGGDGQEEKAGVVSTGLI

SEQ ID NO: 234 - protein, 28 aa, Artificial
  peptide construct
  MISC_FEATURE (1)..(1): X is D and E for acidic amino acids
  MISC_FEATURE (2)..(2): X is A or G
  MISC_FEATURE (3)..(3): X is D and E for acidic amino acids
  MISC_FEATURE (4)..(4): X is F, W or Y for aromatic amino acids
  MISC_FEATURE (5)..(5): X is K, R or H for basic amino acids
  MISC_FEATURE (6)..(6): X is K, R or H for basic amino acids
  MISC_FEATURE (7)..(7): X is D and E for acidic amino acids
  MISC_FEATURE (8)..(8): X is  T or S
  MISC_FEATURE (9)..(9): X is A or G
  MISC_FEATURE (10)..(10): X is F, W or Y for aromatic amino acids
  MISC_FEATURE (11)..(11): X is A and G
  MISC_FEATURE (12)..(12): X is A or G
  MISC_FEATURE (13)..(13): X is A and G
  MISC_FEATURE (14)..(14): X is D and E for acidic amino acids
  MISC_FEATURE (15)..(15): X is A and G
  MISC_FEATURE (16)..(16): X is N or Q for amidated amino acids
  MISC_FEATURE (17)..(17): X is D and E for acidic amino acids
  MISC_FEATURE (18)..(18): X is D and E for acidic amino acids
  MISC_FEATURE (19)..(19): X is K, R or H for basic amino acids
  MISC_FEATURE (20)..(20): X is A and G
  MISC_FEATURE (21)..(21): X is A and G
  MISC_FEATURE (22)..(22): X is I, L or V
  MISC_FEATURE (23)..(23): X is I, L or V
  MISC_FEATURE (24)..(24): X is C or S
  MISC_FEATURE (25)..(25): X is T or S
  MISC_FEATURE (26)..(26): X is A or G
  MISC_FEATURE (27)..(27): X is I, L or V
  MISC_FEATURE (28)..(28): X is I, L or V
XXXXXXXXXXXXXXXXXXXXXXXXXXXX

SEQ ID NO: 235 - protein, 22 aa, Artificial
  Completely synthesized peptide construct
EFRHGGGDGQEEKAGVVSTGLI

SEQ ID NO: 236 - protein, 22 aa, Artificial
  peptide construct
  MISC_FEATURE (1)..(1): X is D and E for acidic amino acids
  MISC_FEATURE (2)..(2): X is F or  P
  MISC_FEATURE (3)..(3): X is K, R or H for basic amino acids
  MISC_FEATURE (4)..(4): X is K, R or H for basic amino acids
  MISC_FEATURE (5)..(5): X is A and G
  MISC_FEATURE (6)..(6): X is A or G
  MISC_FEATURE (7)..(7): X is A and G
  MISC_FEATURE (8)..(8): X is D and E for acidic amino acids
  MISC_FEATURE (9)..(9): X is A and G
  MISC_FEATURE (10)..(10): X is N or Q for amidated amino acids
  MISC_FEATURE (11)..(11): X is D and E for acidic amino acids
  MISC_FEATURE (12)..(12): X is D and E for acidic amino acids
  MISC_FEATURE (13)..(13): X is K, R or H for basic amino acids
  MISC_FEATURE (14)..(14): X is A and G
  MISC_FEATURE (15)..(15): X is A and G
  MISC_FEATURE (16)..(16): X is I, L or V
  MISC_FEATURE (17)..(17): X is I, L or V
  MISC_FEATURE (18)..(18): X is C or S
  MISC_FEATURE (19)..(19): X is T or S
  MISC_FEATURE (20)..(20): X is A or G
  MISC_FEATURE (21)..(21): X is I, L or V
  MISC_FEATURE (22)..(22): X is I, L or V
XXXXXXXXXXXXXXXXXXXXXX

SEQ ID NO: 237 - protein, 37 aa, Artificial
  Completely synthesized peptide construct
DSAFDVLSFTAEEKAGVYKGGGDGQEEKAGVVSTGLI

SEQ ID NO: 238 - protein, 37 aa, Artificial; identical to SEQ ID NO: 158
  peptide construct
  MISC_FEATURE (1)..(1): X is D and E for acidic amino acids
  MISC_FEATURE (2)..(2): X is C or S
  MISC_FEATURE (3)..(3): X is A or G
  MISC_FEATURE (4)..(4): X is F, W or Y for aromatic amino acids
  MISC_FEATURE (5)..(5): X is D and E for acidic amino acids
  MISC_FEATURE (6)..(6): X is I, L or V
  MISC_FEATURE (7)..(7): X is I, L or V
  MISC_FEATURE (8)..(8): X is C or S
  MISC_FEATURE (9)..(9): X is F, W or Y for aromatic amino acids
  MISC_FEATURE (10)..(10): X is T or S
  MISC_FEATURE (11)..(11): X is A or G
  MISC_FEATURE (12)..(12): X is D and E for acidic amino acids
  MISC_FEATURE (13)..(13): X is D and E for acidic amino acids
  MISC_FEATURE (14)..(14): X is K, R or H for basic amino acids
  MISC_FEATURE (15)..(15): X is A or G
  MISC_FEATURE (16)..(16): X is A or G
  MISC_FEATURE (17)..(17): X is I, L or V
  MISC_FEATURE (18)..(18): X is F, W or Y for aromatic amino acids
  MISC_FEATURE (19)..(19): X is K, R or H for basic amino acids
  MISC_FEATURE (20)..(20): X is A and G
  MISC_FEATURE (21)..(21): X is A or G
  MISC_FEATURE (22)..(22): X is A and G
  MISC_FEATURE (23)..(23): X is D and E for acidic amino acids
  MISC_FEATURE (24)..(24): X is A and G
  MISC_FEATURE (25)..(25): X is N or Q for amidated amino acids
  MISC_FEATURE (26)..(26): X is D and E for acidic amino acids
  MISC_FEATURE (27)..(27): X is D andE for acidic amino acids
  MISC_FEATURE (28)..(28): X is K, R or H for basic amino acids
  MISC_FEATURE (29)..(29): X is A and G
  MISC_FEATURE (30)..(30): X is A and G
  MISC_FEATURE (31)..(31): X is I, L or V
  MISC_FEATURE (32)..(32): X is I, L or V
  MISC_FEATURE (33)..(33): X is C or S
  MISC_FEATURE (34)..(34): X is T or S
  MISC_FEATURE (35)..(35): X is A or G
  MISC_FEATURE (36)..(36): X is I, L or V
  MISC_FEATURE (37)..(37): X is I, L or V

SEQ ID NO: 239 - protein, 32 aa, Artificial
  Completely synthesized peptide construct
SLKLMATLFSTYASGGGDGQEEKAGVVSTGLI

SEQ ID NO: 240 - protein, 32 aa, Artificial; identical to SEQ ID NO: 160
  peptide construct
  MISC_FEATURE (1)..(1): X is C or S
  MISC_FEATURE (2)..(2): X is I, L or V
  MISC_FEATURE (3)..(3): X is K, R or H for basic amino acids
  MISC_FEATURE (4)..(4): X is I, L or V
  MISC_FEATURE (5)..(5): X is M or Nle
  MISC_FEATURE (6)..(6): X is A or G
  MISC_FEATURE (7)..(7): X is T or S
  MISC_FEATURE (8)..(8): X is I, L or V
  MISC_FEATURE (9)..(9): X is F or P
  MISC_FEATURE (10)..(10): X is C or S
  MISC_FEATURE (11)..(11): X is T or S
  MISC_FEATURE (12)..(12): X is F, W or Y for aromatic amino acids
  MISC_FEATURE (13)..(13): X is A or G
  MISC_FEATURE (14)..(14): X is C or S
  MISC_FEATURE (15)..(15): X is A and G
  MISC_FEATURE (16)..(16): X is A or G
  MISC_FEATURE (17)..(17): X is A and G
  MISC_FEATURE (18)..(18): X is D and E for acidic amino acids
  MISC_FEATURE (19)..(19): X is A and G
  MISC_FEATURE (20)..(20): X is N or Q for amidated amino acids
  MISC_FEATURE (21)..(21): X is D and E for acidic amino acids
  MISC_FEATURE (22)..(22): X is D and E for acidic amino acids
  MISC_FEATURE (23)..(23): X is K, R or H for basic amino acids
  MISC_FEATURE (24)..(24): X is A and G
  MISC_FEATURE (25)..(25): X is A and G
  MISC_FEATURE (26)..(26): X is I, L or V
  MISC_FEATURE (27)..(27): X is I, L or V
  MISC_FEATURE (28)..(28): X is C or S
  MISC_FEATURE (29)..(29): X is T or S
  MISC_FEATURE (30)..(30): X is A and G
  MISC_FEATURE (31)..(31): X is I, L or V
  MISC_FEATURE (32)..(32): X is I, L or V

SEQ ID NO: 241 - protein, 32 aa, Artificial
  Completely synthesized peptide construct
SLKLMATLFSSYATGGGDGQEEKAGVVSTGLI

SEQ ID NO: 242 - protein, 32 aa, Artificial; identical to SEQ ID NO: 160
  peptide construct
  MISC_FEATURE (1)..(1): X is C or S
  MISC_FEATURE (2)..(2): X is I, L or V
  MISC_FEATURE (3)..(3): X is K, R or H for basic amino acids
  MISC_FEATURE (4)..(4): X is I, L or V
  MISC_FEATURE (5)..(5): X is M or Nle
  MISC_FEATURE (6)..(6): X is A or G
  MISC_FEATURE (7)..(7): X is T or S
  MISC_FEATURE (8)..(8): X is I, L or V
  MISC_FEATURE (9)..(9): X is F or P
  MISC_FEATURE (10)..(10): X is C or S
  MISC_FEATURE (11)..(11): X is C or S
  MISC_FEATURE (12)..(12): X is F, W or  Y for aromatic amino acids
  MISC_FEATURE (13)..(13): X is A or G
  MISC_FEATURE (14)..(14): X is T or S
  MISC_FEATURE (15)..(15): X is A and G
  MISC_FEATURE (16)..(16): X is A and G
  MISC_FEATURE (17)..(17): X is A or G
  MISC_FEATURE (18)..(18): X is D and E for acidic amino acids
  MISC_FEATURE (19)..(19): X is A and G
  MISC_FEATURE (20)..(20): X is N or Q for amidated amino acids
  MISC_FEATURE (21)..(21): X is D and E for acidic amino acids
  MISC_FEATURE (22)..(22): X is D and E for acidic amino acids
  MISC_FEATURE (23)..(23): X is K, R or H for basic amino acids
  MISC_FEATURE (24)..(24): X is A and G
  MISC_FEATURE (25)..(25): X is A and G
  MISC_FEATURE (26)..(26): X is I, L or V
  MISC_FEATURE (27)..(27): X is I, L or V
  MISC_FEATURE (28)..(28): X is C or S
  MISC_FEATURE (29)..(29): X is T or S
  MISC_FEATURE (30)..(30): X is A and G
  MISC_FEATURE (31)..(31): X is I, L or V
  MISC_FEATURE (32)..(32): X is I, L or V

SEQ ID NO: 243 - protein, 30 aa, Artificial
  Completely synthesized peptide construct
NITEAIADLTQKGGGDGQEEKAGVVSTGLI

SEQ ID NO: 244 - protein, 29 aa, Artificial
  peptide construct
  MISC_FEATURE (1)..(1): X is N or Q for amidated amino acids
  MISC_FEATURE (2)..(2): X is I, L or V
  MISC_FEATURE (3)..(3): X is T or S
  MISC_FEATURE (4)..(4): X is D and E for acidic amino acids
  MISC_FEATURE (5)..(5): X is I, L or V
  MISC_FEATURE (6)..(6): X is A or G
  MISC_FEATURE (7)..(7): X is D and E for acidic amino acids
  MISC_FEATURE (8)..(8): X is I, L or V
  MISC_FEATURE (9)..(9): X is  T or S
  MISC_FEATURE (10)..(10): X is N or Q for amidated amino acids
  MISC_FEATURE (11)..(11): X is K, R or H for basic amino acids
  MISC_FEATURE (12)..(12): X is A and G
  MISC_FEATURE (13)..(13): X is A or G
  MISC_FEATURE (14)..(14): X is A and G
  MISC_FEATURE (15)..(15): X is D and E for acidic amino acids
  MISC_FEATURE (16)..(16): X is A and G
  MISC_FEATURE (17)..(17): X is N or Q for amidated amino acids
  MISC_FEATURE (18)..(18): X is D and E for acidic amino acids
  MISC_FEATURE (19)..(19): X is D and E for acidic amino acids
  MISC_FEATURE (20)..(20): X is K, R or H for basic amino acids
  MISC_FEATURE (21)..(21): X is A and G
  MISC_FEATURE (22)..(22): X is A and G
  MISC_FEATURE (23)..(23): X is I, L or V
  MISC_FEATURE (24)..(24): X is I, L or V
  MISC_FEATURE (25)..(25): X is C or S
  MISC_FEATURE (26)..(26): X is T or S
  MISC_FEATURE (27)..(27): X is A and G
  MISC_FEATURE (28)..(28): X is I, L or V
  MISC_FEATURE (29)..(29): X is I, L or V
XXXXXXXXXXXXXXXXXXXXXXXXXXXXX

SEQ ID NO: 245 - protein, 58 aa, Artificial
  Completely synthesized peptide construct
NMYAMMIARFKMFPEVKEKGMAALPRLIAFTSEHSHFSLKGGGDGQEEKAGVVSTGLI

SEQ ID NO: 246 - protein, 58 aa, Artificial; identical to SEQ ID NO: 142
  peptide construct
  MISC_FEATURE (1)..(1): X is N or Q for amidated amino acids
  MISC_FEATURE (2)..(2): X is M or Nle
  MISC_FEATURE (3)..(3): X is F, W or Y for aromatic amino acids
  MISC_FEATURE (4)..(4): X is A or G
  MISC_FEATURE (5)..(5): X is M or Nle
  MISC_FEATURE (6)..(6): Xis M or Nle
  MISC_FEATURE (7)..(7): X is I, L or V
  MISC_FEATURE (8)..(8): X is A or G
  MISC_FEATURE (9)..(9): X is K, R or H for basic amino acids
  MISC_FEATURE (10)..(10): X is F, W or Y for aromatic amino acids
  MISC_FEATURE (11)..(11): X is K, R or H for basic amino acids
  MISC_FEATURE (12)..(12): X is M or Nle
  MISC_FEATURE (13)..(13): X is F, W or Y for aromatic amino acids
  MISC_FEATURE (14)..(14): X is F or P
  MISC_FEATURE (15)..(15): X is D and E for acidic amino acids
  MISC_FEATURE (16)..(16): X is I, L or V
  MISC_FEATURE (17)..(17): X is K, R or H for basic amino acids
  MISC_FEATURE (18)..(18): X is D and E for acidic amino acids
  MISC_FEATURE (19)..(19): X is K, R or H for basic amino acids
  MISC_FEATURE (20)..(20): X is A or G
  MISC_FEATURE (21)..(21): X is M or Nle
  MISC_FEATURE (22)..(22): X is A or G
  MISC_FEATURE (23)..(23): X is A or G
  MISC_FEATURE (24)..(24): X is I, L or V
  MISC_FEATURE (25)..(25): X is F or P
  MISC_FEATURE (26)..(26): X is K, R or H for basic amino acids
  MISC_FEATURE (27)..(27): X is I, L or V
  MISC_FEATURE (28)..(28): X is I, L or V
  MISC_FEATURE (29)..(29): X is A or G
  MISC_FEATURE (30)..(30): X is F, W or  Y for aromatic amino acids
  MISC_FEATURE (31)..(31): X is T or S
  MISC_FEATURE (32)..(32): X is C or S
  MISC_FEATURE (33)..(33): X is D and E for acidic amino acids
  MISC_FEATURE (34)..(34): X is K, R or H for basic amino acids
  MISC_FEATURE (35)..(35): X is C or S
  MISC_FEATURE (36)..(36): X is K, R or H for basic amino acids
  MISC_FEATURE (37)..(37): X is F, W or Y aromatic amino acids
  MISC_FEATURE (38)..(38): X is C or S
  MISC_FEATURE (39)..(39): X is I, L or V
  MISC_FEATURE (40)..(40): X is K, R or H for basic amino acids
  MISC_FEATURE (41)..(41): X is A and G
  MISC_FEATURE (42)..(42): X is A or G
  MISC_FEATURE (43)..(43): X is A and G
  MISC_FEATURE (44)..(44): X is D and E for acidic amino acids
  MISC_FEATURE (45)..(45): X is A and G
  MISC_FEATURE (46)..(46): X is N or Q for amidated amino acids
  MISC_FEATURE (47)..(47): X is D and E for acidic amino acids
  MISC_FEATURE (48)..(48): X is D and E for acidic amino acids
  MISC_FEATURE (49)..(49): X is K, R or H for basic amino acids
  MISC_FEATURE (50)..(50): X is A and G
  MISC_FEATURE (51)..(51): X is A and G
  MISC_FEATURE (52)..(52): X is I, L or V
  MISC_FEATURE (53)..(53): X is I, L or V
  MISC_FEATURE (54)..(54): X is C or S
  MISC_FEATURE (55)..(55): X is T or S
  MISC_FEATURE (56)..(56): X is A or G
  MISC_FEATURE (57)..(57): X is I, L or V
  MISC_FEATURE (58)..(58): X is I, L or V

SEQ ID NO: 247 - protein, 52 aa, Artificial
  Completely synthesized peptide construct
IARFKMFPEVKEKGMAALPRLIAFTSEHSHFSLKGGGDGQEEKAGVVSTGLI

SEQ ID NO: 248 - protein, 52 aa, Artificial; identical to SEQ ID NO: 168
  peptide construct
  MISC_FEATURE (1)..(1): X is I, L or V
  MISC_FEATURE (2)..(2): X is A or G
  MISC_FEATURE (3)..(3): X is K, R or H for basic amino acids
  MISC_FEATURE (4)..(4): X is F, W or Y for aromatic amino acids
  MISC_FEATURE (5)..(5): X is K, R or H for basic amino acids
  MISC_FEATURE (6)..(6): X is M or Nle
  MISC_FEATURE (7)..(7): X is F, W or Y for aromatic amino acids
  MISC_FEATURE (8)..(8): X is F or P
  MISC_FEATURE (9)..(9): X is D and E for acidic amino acids
  MISC_FEATURE (10)..(10): X is I, L or V
  MISC_FEATURE (11)..(11): X is K, R or H for basic amino acids
  MISC_FEATURE (12)..(12): X is D and E for acidic amino acids
  MISC_FEATURE (13)..(13): X is K, R or H for basic amino acids
  MISC_FEATURE (14)..(14): X is A or G
  MISC_FEATURE (15)..(15): X is M or Nle
  MISC_FEATURE (16)..(16): X is A or G
  MISC_FEATURE (17)..(17): X is A or G
  MISC_FEATURE (18)..(18): X is I, L or V
  MISC_FEATURE (19)..(19): X is F or P
  MISC_FEATURE (20)..(20): X is K,  R or H for basic amino acids
  MISC_FEATURE (21)..(21): X is I, L or V
  MISC_FEATURE (22)..(22): X is I, L or V
  MISC_FEATURE (23)..(23): X is A or G
  MISC_FEATURE (24)..(24): X is F, W or Y for aromatic amino acids
  MISC_FEATURE (25)..(25): X is T or S
  MISC_FEATURE (26)..(26): X is C or S
  MISC_FEATURE (27)..(27): X is D and E for acidic amino acids
  MISC_FEATURE (28)..(28): X is K, R or H for basic amino acids
  MISC_FEATURE (29)..(29): X is C or S
  MISC_FEATURE (30)..(30): X is K, R or H for basic amino acids
  MISC_FEATURE (31)..(31): X is F, W or Y for aromatic amino acids
  MISC_FEATURE (32)..(32): X is C or S
  MISC_FEATURE (33)..(33): X is I, L or V
  MISC_FEATURE (34)..(34): X is K, R or H for basic amino acids
  MISC_FEATURE (35)..(35): X is A and G
  MISC_FEATURE (36)..(36): X is A or G
  MISC_FEATURE (37)..(37): X is A and G
  MISC_FEATURE (38)..(38): X is D and E for acidic amino acids
  MISC_FEATURE (39)..(39): X is A and G
  MISC_FEATURE (40)..(40): X is N or Q for amidated amino acids
  MISC_FEATURE (41)..(41): X is  D and E for acidic amino acids
  MISC_FEATURE (42)..(42): X is D and E for acidic amino acids
  MISC_FEATURE (43)..(43): X is K, R or H for basic amino acids
  MISC_FEATURE (44)..(44): X is A and G
  MISC_FEATURE (45)..(45): X is A and G
  MISC_FEATURE (46)..(46): X is I, L or V
  MISC_FEATURE (47)..(47): X is I, L or V
  MISC_FEATURE (48)..(48): X is C or S
  MISC_FEATURE (49)..(49): X is T or S
  MISC_FEATURE (50)..(50): X is A and G
  MISC_FEATURE (51)..(51): X is I, L or V
  MISC_FEATURE (52)..(52): X is I, L or V

SEQ ID NO: 249 - protein, 37 aa, Artificial
  Completely synthesized peptide construct
SRLSKVAPVIKARMMEYGTTGGDGQEEKAGVVSTGLI

SEQ ID NO: 250 - protein, 38 aa, Artificial; identical to SEQ ID NO: 170
  peptide construct
  MISC_FEATURE (1)..(1): X is C or S
  MISC_FEATURE (2)..(2): X is K, R or H for basic amino acids
  MISC_FEATURE (3)..(3): X is I, L or V
  MISC_FEATURE (4)..(4): X is C or S
  MISC_FEATURE (5)..(5): X is K, R or H for basic amino acids
  MISC_FEATURE (6)..(6): X is I, L or V
  MISC_FEATURE (7)..(7): X is A or G
  MISC_FEATURE (8)..(8): X is F or  P
  MISC_FEATURE (9)..(9): X is I, L or V
  MISC_FEATURE (10)..(10): X is I, L or V
  MISC_FEATURE (11)..(11): X is K, R or H for basic amino acids
  MISC_FEATURE (12)..(12): X is A or  G
  MISC_FEATURE (13)..(13): X is K, R or H for basic amino acids
  MISC_FEATURE (14)..(14): X is M or Nle
  MISC_FEATURE (15)..(15): X is M or Nle
  MISC_FEATURE (16)..(16): X is D and E for acidic amino acids
  MISC_FEATURE (17)..(17): X is F, W or Y for acidic amino acids
  MISC_FEATURE (18)..(18): X is A or G
  MISC_FEATURE (19)..(19): X is T or S
  MISC_FEATURE (20)..(20): X is T or S
  MISC_FEATURE (21)..(21): X is A and G
  MISC_FEATURE (22)..(22): X is A or  G
  MISC_FEATURE (23)..(23): X is A and G
  MISC_FEATURE (24)..(24): X is D and E for acidic amino acids
  MISC_FEATURE (25)..(25): X is A and G
  MISC_FEATURE (26)..(26): X is N or Q for amidated amino acids
  MISC_FEATURE (27)..(27): X is D and E for acidic amino acids
  MISC_FEATURE (28)..(28): X is D and E for acidic amino acids
  MISC_FEATURE (29)..(29): X is K, R or H for basic amino acids
  MISC_FEATURE (30)..(30): X is A and G
  MISC_FEATURE (31)..(31): X is A and G
  MISC_FEATURE (32)..(32): X is I, L or V
  MISC_FEATURE (33)..(33): X is I, L or V
  MISC_FEATURE (34)..(34): X is C or S
  MISC_FEATURE (35)..(35): X is T or S
  MISC_FEATURE (36)..(36): X is A and G
  MISC_FEATURE (37)..(37): X is I, L or V
  MISC_FEATURE (38)..(38): X is I, L or V

SEQ ID NO: 251 - protein, 37 aa, Artificial
  Completely synthesized peptide construct
IPPSLRYLEDEERMSRLSKGGGDGQEEKAGVVSTGLI

SEQ ID NO: 252 - protein, 36 aa, Artificial; identical to SEQ ID NO: 172
  peptide construct
  MISC_FEATURE (1)..(1): X is I, L or V
  MISC_FEATURE (2)..(2): X is F or P
  MISC_FEATURE (3)..(3): X is F or P
  MISC_FEATURE (4)..(4): X is C or S
  MISC_FEATURE (5)..(5): X is I, L or V
  MISC_FEATURE (6)..(6): X is K, R or H for basic amino acids
  MISC_FEATURE (7)..(7): X is F, W or Y for aromatic amino acids
  MISC_FEATURE (8)..(8): X is D and E for acidic amino acids
  MISC_FEATURE (9)..(9): X is D and E for acidic amino acids
  MISC_FEATURE (10)..(10): X is D and E for acidic amino acids
  MISC_FEATURE (11)..(11): X is D and E for acidic amino acids
  MISC_FEATURE (12)..(12): X is K, R or H for basic amino acids
  MISC_FEATURE (13)..(13): X is M or Nle
  MISC_FEATURE (14)..(14): X is C or S
  MISC_FEATURE (15)..(15): X is K, R or H for basic amino acids
  MISC_FEATURE (16)..(16): X is I, L or V
  MISC_FEATURE (17)..(17): X is C or S
  MISC_FEATURE (18)..(18): X is K, R or H for basic amino acids
  MISC_FEATURE (19)..(19): X is A and G
  MISC_FEATURE (20)..(20): X is A or G
  MISC_FEATURE (21)..(21): X is A and G
  MISC_FEATURE (22)..(22): X is D and E for acidic amino acids
  MISC_FEATURE (23)..(23): X is A and G
  MISC_FEATURE (24)..(24): X is N or Q for amidated amino acids
  MISC_FEATURE (25)..(25): X is D and E for acidic amino acids
  MISC_FEATURE (26)..(26): X is D and E for acidic amino acids
  MISC_FEATURE (27)..(27): X is K, R or H for basic amino acids
  MISC_FEATURE (28)..(28): X is A and G
  MISC_FEATURE (29)..(29): X is A and G
  MISC_FEATURE (30)..(30): X is I, L or V
  MISC_FEATURE (31)..(31): X is I, L or V
  MISC_FEATURE (32)..(32): X is C or S
  MISC_FEATURE (33)..(33): X is T or S
  MISC_FEATURE (34)..(34): X is A or G
  MISC_FEATURE (35)..(35): X is I, L or V
  MISC_FEATURE (36)..(36): X is I, L or V

SEQ ID NO: 253 - protein, 38 aa, Artificial
  Completely synthesized peptide construct
NTNMFTYEIAPVFVLLEYVTGGGDGQEEKAGVVSTGLI

SEQ ID NO: 254 - protein, 38 aa, Artificial; identical to SEQ ID NO: 170
  peptide construct
  MISC_FEATURE (1)..(1): X is N or Q for amidated amino acids
  MISC_FEATURE (2)..(2): X is T or S
  MISC_FEATURE (3)..(3): X is N or Q for amidated amino acids
  MISC_FEATURE (4)..(4): X is M or Nle
  MISC_FEATURE (5)..(5): X is F, W or Y for aromatic amino acids
  MISC_FEATURE (6)..(6): X is T or S
  MISC_FEATURE (7)..(7): X is F, W or Y for aromatic amino acids
  MISC_FEATURE (8)..(8): X is D and E for acidic amino acids
  MISC_FEATURE (9)..(9): X is I, L or V
  MISC_FEATURE (10)..(10): X is A or G
  MISC_FEATURE (11)..(11): X is F or P
  MISC_FEATURE (12)..(12): X is I, L or V
  MISC_FEATURE (13)..(13): X is F, W or Y for aromatic amino acids
  MISC_FEATURE (14)..(14): X is I, L or V
  MISC_FEATURE (15)..(15): X is I, L or V
  MISC_FEATURE (16)..(16): X is I, L or V
  MISC_FEATURE (17)..(17): X is D and E for acidic amino acids
  MISC_FEATURE (18)..(18): X is F, W or Y for aromatic amino acids
  MISC_FEATURE (19)..(19): X is I, L or V
  MISC_FEATURE (20)..(20): X is T or S
  MISC_FEATURE (21)..(21): X is A and G
  MISC_FEATURE (22)..(22): X is A or G
  MISC_FEATURE (23)..(23): X is A and G
  MISC_FEATURE (24)..(24): X is D and E for acidic amino acids
  MISC_FEATURE (25)..(25): X is A and G
  MISC_FEATURE (26)..(26): X is N or Q for amidated amino acids
  MISC_FEATURE (27)..(27): X is D and E for acidic amino acids
  MISC_FEATURE (28)..(28): X is D and E for acidic amino acids
  MISC_FEATURE (29)..(29): X is K, R or H for basic amino acids
  MISC_FEATURE (30)..(30): X is A and G
  MISC_FEATURE (31)..(31): X is A and G
  MISC_FEATURE (32)..(32): X is I, L or V
  MISC_FEATURE (33)..(33): X is I, L or V
  MISC_FEATURE (34)..(34): X is C or S
  MISC_FEATURE (35)..(35): X is T or C
  MISC_FEATURE (36)..(36): X is A or G
  MISC_FEATURE (37)..(37): X is I, L or V
  MISC_FEATURE (38)..(38): X is I, L or V

SEQ ID NO: 255 - protein, 33 aa, Artificial
  Completely synthesized peptide construct
FKADEKKFWGKYLYEGGGDGQEEKAGVVSTGLI

SEQ ID NO: 256 - protein, 33 aa, Artificial; identical to SEQ ID NO: 99
  peptide construct
  MISC_FEATURE (1)..(1): X is F, W or Y for aromatic amino acids
  MISC_FEATURE (2)..(2): X is K, R or H for basic amino acids
  MISC_FEATURE (3)..(3): X is A or G
  MISC_FEATURE (4)..(4): X is D and E for acidic amino acids
  MISC_FEATURE (5)..(5): X is D and E for acidic amino acids
  MISC_FEATURE (6)..(6): X is K, R or H for basic amino acids
  MISC_FEATURE (7)..(7): X is K, R or H for basic amino acids
  MISC_FEATURE (8)..(8): X is F, W or Y for aromatic amino acids
  MISC_FEATURE (9)..(9): X is F, W or Y for aromatic amino acids
  MISC_FEATURE (10)..(10): X is A or G
  MISC_FEATURE (11)..(11): X is K, R or H for basic amino acids
  MISC_FEATURE (12)..(12): X is F, W or Y for aromatic amino acids
  MISC_FEATURE (13)..(13): X is I, L or V
  MISC_FEATURE (14)..(14): X is F, W or Y for aromatic amino acids
  MISC_FEATURE (15)..(15): X is D and E for acidic amino acids
  MISC_FEATURE (16)..(16): X is A and G
  MISC_FEATURE (17)..(17): X is A or G
  MISC_FEATURE (18)..(18): X is A and G
  MISC_FEATURE (19)..(19): X is D and E for acidic amino acids
  MISC_FEATURE (20)..(20): X is A and G
  MISC_FEATURE (21)..(21): X is N or Q for amidated amino acids
  MISC_FEATURE (22)..(22): X is D and E for acidic amino acids
  MISC_FEATURE (23)..(23): X is D and E for acidic amino acids
  MISC_FEATURE (24)..(24): X is K, R or H for basic amino acids
  MISC_FEATURE (25)..(25): X is A and G
  MISC_FEATURE (26)..(26): X is A and G
  MISC_FEATURE (27)..(27): X is I, L or V
  MISC_FEATURE (28)..(28): X is I, L or V
  MISC_FEATURE (29)..(29): X is C or S
  MISC_FEATURE (30)..(30): X is T or S
  misc_feature (31)..(31): Xaa can be any naturally occurring amino acid
  MISC_FEATURE (32)..(32): X is A and G
  MISC_FEATURE (32)..(32): X is I, L or V
  MISC_FEATURE (33)..(33): X is I, L or V

SEQ ID NO: 257 - protein, 33 aa, Artificial
  Completely synthesized peptide construct
SHLVEALYLVCGERGGGGDGQEEKAGVVSTGLI

SEQ ID NO: 258 - protein, 32 aa, Artificial; identical to SEQ ID NO: 160
  peptide construct
  MISC_FEATURE (1)..(1): X is C or S
  MISC_FEATURE (2)..(2): X is K, R or H for basic amino acids
  MISC_FEATURE (3)..(3): X is I, L or V
  MISC_FEATURE (4)..(4): X is I, L or V
  MISC_FEATURE (5)..(5): X is D and E for acidic amino acids
  MISC_FEATURE (6)..(6): X is A or G
  MISC_FEATURE (7)..(7): X is I, L or V
  MISC_FEATURE (8)..(8): X is F, W or Y for aromatic amino acids
  MISC_FEATURE (9)..(9): X is I, L or V
  MISC_FEATURE (10)..(10): X is C or S
  MISC_FEATURE (11)..(11): X is A or G
  MISC_FEATURE (12)..(12): X is D and E for acidic amino acids
  MISC_FEATURE (13)..(13): X is K, R or H for basic amino acids
  MISC_FEATURE (14)..(14): X is A or G
  MISC_FEATURE (15)..(15): X is A and G
  MISC_FEATURE (16)..(16): X is A or G
  MISC_FEATURE (17)..(17): X is A and G
  MISC_FEATURE (18)..(18): X is D and E for acidic amino acids
  MISC_FEATURE (19)..(19): X is A and G
  MISC_FEATURE (20)..(20): X is N or Q for amidated amino acids
  MISC_FEATURE (21)..(21): X is D and E for acidic amino acids
  MISC_FEATURE (22)..(22): X is D and E for acidic amino acids
  MISC_FEATURE (23)..(23): X is K, R or H for basic amino acids
  MISC_FEATURE (24)..(24): X is A and G
  MISC_FEATURE (25)..(25): X is A and G
  MISC_FEATURE (26)..(26): X is I, L or V
  MISC_FEATURE (27)..(27): X is I, L or V
  MISC_FEATURE (28)..(28): X is C or S
  MISC_FEATURE (29)..(29): X is T or S
  MISC_FEATURE (30)..(30): X is A and G
  MISC_FEATURE (31)..(31): X is I, L or V
  MISC_FEATURE (32)..(32): X is I, L or V

SEQ ID NO: 259 - protein, 42 aa, Artificial
  Completely synthesized peptide construct
VLGGGCALLRCIPALDSLTPANEDGGGDGQEEKAGVVSTGLI

SEQ ID NO: 260 - protein, 42 aa, Artificial; identical to SEQ ID NO: 180
  peptide construct
  MISC_FEATURE (1)..(1): X is I, L or V
  MISC_FEATURE (2)..(2): X is I, L or V
  MISC_FEATURE (3)..(3): X is A or G
  MISC_FEATURE (4)..(4): X is A or G
  MISC_FEATURE (5)..(5): X is A or G
  MISC_FEATURE (6)..(6): X is C or S
  MISC_FEATURE (7)..(7): X is A or G
  MISC_FEATURE (8)..(8): X is I, L or V
  MISC_FEATURE (9)..(9): X is I, L or V
  MISC_FEATURE (10)..(10): X is K, R or H for basic amino acids
  MISC_FEATURE (11)..(11): X is C or S
  MISC_FEATURE (12)..(12): X is I, L or V
  MISC_FEATURE (13)..(13): X is F or P
  MISC_FEATURE (14)..(14): X is A or G
  MISC_FEATURE (15)..(15): X is I, L or V
  MISC_FEATURE (16)..(16): X is D and E for acidic amino acids
  MISC_FEATURE (17)..(17): X is C or S
  MISC_FEATURE (18)..(18): X is I, L or V
  MISC_FEATURE (19)..(19): X is T or S
  MISC_FEATURE (20)..(20): X is F or P
  MISC_FEATURE (21)..(21): X is A or G
  MISC_FEATURE (22)..(22): X is N or Q for amidated amino acids
  MISC_FEATURE (23)..(23): X is D and E for acidic amino acids
  MISC_FEATURE (24)..(24): X is D and E for acidic amino acids
  MISC_FEATURE (25)..(25): X is A and G
  MISC_FEATURE (26)..(26): X is A or G
  MISC_FEATURE (27)..(27): X is A and G
  MISC_FEATURE (28)..(28): X is D and E for acidic amino acids
  MISC_FEATURE (29)..(29): X is A and G
  MISC_FEATURE (30)..(30): X is N or Q for amidated amino acids
  MISC_FEATURE (31)..(31): X is D and E for acidic amino acids
  MISC_FEATURE (32)..(32): X is D and E for acidic amino acids
  MISC_FEATURE (33)..(33): X is K, R or H for basic amino acids
  MISC_FEATURE (34)..(34): X is A and G
  MISC_FEATURE (35)..(35): X is A and G
  MISC_FEATURE (36)..(36): X is I, L or V
  MISC_FEATURE (37)..(37): X is I, L or V
  MISC_FEATURE (38)..(38): X is C or S
  MISC_FEATURE (39)..(39): X is T or S
  MISC_FEATURE (40)..(40): X is A or G
  MISC_FEATURE (41)..(41): X is I, L or V
  MISC_FEATURE (42)..(42): X is I, L or V

SEQ ID NO: 261 - protein, 46 aa, Artificial
  Completely synthesized peptide construct
EACVTSWLWSGEGAVFYRVDLHFINLGTGGGDGQEEKAGVVSTGLI

SEQ ID NO: 262 - protein, 46 aa, Artificial; identical to SEQ ID NO: 144
  peptide construct
  MISC_FEATURE (1)..(1): X is D and E for acidic amino acids
  MISC_FEATURE (2)..(2): X is  A or G
  MISC_FEATURE (3)..(3): X is C or S
  MISC_FEATURE (4)..(4): X is I, L or V
  MISC_FEATURE (5)..(5): X is T or S
  MISC_FEATURE (6)..(6): X is C or S
  MISC_FEATURE (7)..(7): X is F, W or Y for aromatic amino acids
  MISC_FEATURE (8)..(8): X is I, L or V
  MISC_FEATURE (9)..(9): X is F, W or Y for aromatic amino acids
  MISC_FEATURE (10)..(10): X is C or S
  MISC_FEATURE (11)..(11): X is A or  G
  MISC_FEATURE (12)..(12): X is D and E for acidic amino acids
  MISC_FEATURE (13)..(13): X is A or G
  MISC_FEATURE (14)..(14): X is A or G
  MISC_FEATURE (15)..(15): X is I, L or V
  MISC_FEATURE (16)..(16): X is F, W or Y for aromatic amino acids
  MISC_FEATURE (17)..(17): X is F, W or Y for aromatic amino acids
  MISC_FEATURE (18)..(18): X is K, R or H for basic amino acids
  MISC_FEATURE (19)..(19): X is I, L or V
  MISC_FEATURE (20)..(20): X is D and E for acidic amino acids
  MISC_FEATURE (21)..(21): X is I, L or V
  MISC_FEATURE (22)..(22): X is K, R or H for basic amino acids
  MISC_FEATURE (23)..(23): X is F, W or Y for aromatic amino acids
  MISC_FEATURE (24)..(24): X is I, L or V
  MISC_FEATURE (25)..(25): X is N or Q for amidated amino acids
  MISC_FEATURE (26)..(26): X is I, L or V
  MISC_FEATURE (27)..(27): X is A or G
  MISC_FEATURE (28)..(28): X is T or S
  MISC_FEATURE (29)..(29): X is A and G
  MISC_FEATURE (30)..(30): X is A or G
  MISC_FEATURE (31)..(31): X is A or G
  MISC_FEATURE (32)..(32): X is D and E for acidic amino acids
  MISC_FEATURE (33)..(33): X is A and G
  MISC_FEATURE (34)..(34): X is N or Q for amidated amino acids
  MISC_FEATURE (35)..(35): X is D and E for acidic amino acids
  MISC_FEATURE (36)..(36): X is D and E for acidic amino acids
  MISC_FEATURE (37)..(37): X is K, R or H for basic amino acids
  MISC_FEATURE (38)..(38): X is A and G
  MISC_FEATURE (39)..(39): X is A and G
  MISC_FEATURE (40)..(40): X is I, L or V
  MISC_FEATURE (41)..(41): X is I, L or V
  MISC_FEATURE (42)..(42): X is C or S
  MISC_FEATURE (43)..(43): X is T or S
  MISC_FEATURE (44)..(44): X is A and G
  MISC_FEATURE (45)..(45): X is I, L or V
  MISC_FEATURE (46)..(46): X is I, L or V

SEQ ID NO: 263 - protein, 39 aa, Artificial
  Completely synthesized peptide construct
MDFWCVEHDRPPPATPTSLTTGGGDGQEEKAGVVSTGLI

SEQ ID NO: 264 - protein, 39 aa, Artificial; identical to SEQ ID NO: 184
  peptide construct
  MISC_FEATURE (1)..(1): X is M or Nle
  MISC_FEATURE (2)..(2): X is D and E for acidic amino acids
  MISC_FEATURE (3)..(3): X is F, W or Y for aromatic amino acids
  MISC_FEATURE (4)..(4): X is F, W or Y for aromatic amino acids
  MISC_FEATURE (5)..(5): X is C or S
  MISC_FEATURE (6)..(6): X is I, L or V
  MISC_FEATURE (7)..(7): X is D and E for acidic amino acids
  MISC_FEATURE (8)..(8): X is K, R or H for basic amino acids
  MISC_FEATURE (9)..(9): X is D and E for acidic amino acids
  MISC_FEATURE (10)..(10): X is K, R or H for basic amino acids
  MISC_FEATURE (11)..(11): X is F or P
  MISC_FEATURE (12)..(12): X is F or P
  MISC_FEATURE (13)..(13): X is F or P
  MISC_FEATURE (14)..(14): X is A or G
  MISC_FEATURE (15)..(15): X is T or S
  MISC_FEATURE (16)..(16): X is F or P
  MISC_FEATURE (17)..(17): X is T or S
  MISC_FEATURE (18)..(18): X is C or S
  MISC_FEATURE (19)..(19): X is I, L or V
  MISC_FEATURE (20)..(20): X is T or S
  MISC_FEATURE (21)..(21): X is T or S
  MISC_FEATURE (22)..(22): X is A and G
  MISC_FEATURE (23)..(23): X is A or G
  MISC_FEATURE (24)..(24): X is A and G
  MISC_FEATURE (25)..(25): X is D and E for acidic amino acids
  MISC_FEATURE (26)..(26): X is A and G
  MISC_FEATURE (27)..(27): X is N or Q for amidated amino acids
  MISC_FEATURE (28)..(28): X is D and E for acidic amino acids
  MISC_FEATURE (29)..(29): X is D and E for acidic amino acids
  MISC_FEATURE (30)..(30): X is K, R or H for basic amino acids
  MISC_FEATURE (31)..(31): X is A and G
  MISC_FEATURE (32)..(32): X is A and G
  MISC_FEATURE (33)..(33): X is I, L or V
  MISC_FEATURE (34)..(34): X is I, L or V
  MISC_FEATURE (35)..(35): X is C or S
  MISC_FEATURE (36)..(36): X is T or S
  MISC_FEATURE (37)..(37): X is A and G
  MISC_FEATURE (38)..(38): X is I, L or V
  MISC_FEATURE (39)..(39): X is I, L or V

SEQ ID NO: 265 - protein, 38 aa, Artificial
  Completely synthesized peptide construct
NMYAMMIARFKMFPEVKEKGGGGDGQEEKAGVVSTGLI

SEQ ID NO: 266 - protein, 38 aa, Artificial; identical to SEQ ID NO: 170
  peptide construct
  MISC_FEATURE (1)..(1): X is N or Q for amidated amino acids
  MISC_FEATURE (2)..(2): X is M or Nle
  MISC_FEATURE (3)..(3): X is F, W or Y for aromatic amino acids
  MISC_FEATURE (4)..(4): X is A or G
  MISC_FEATURE (5)..(5): X is M or Nle
  MISC_FEATURE (6)..(6): X is M or Nle
  MISC_FEATURE (7)..(7): X is I, L or V
  MISC_FEATURE (8)..(8): X is A or G
  MISC_FEATURE (9)..(9): X is K, R or H for basic amino acids
  MISC_FEATURE (10)..(10): X is F, W or Y for aromatic amino acids
  MISC_FEATURE (11)..(11): X is K, R or H for basic amino acids
  MISC_FEATURE (12)..(12): X is M or Nle
  MISC_FEATURE (13)..(13): X is F, W or Y for aromatic amino acids
  MISC_FEATURE (14)..(14): X is F or P
  MISC_FEATURE (15)..(15): X is D and E for acidic amino acids
  MISC_FEATURE (16)..(16): X is I, L or V
  MISC_FEATURE (17)..(17): X is K, R or H for basic amino acids
  MISC_FEATURE (18)..(18): X is D and E for acidic amino acids
  MISC_FEATURE (19)..(19): X is K, R or H for basic amino acids
  MISC_FEATURE (20)..(20): X is A or G
  MISC_FEATURE (21)..(21): X is A and G
  MISC_FEATURE (22)..(22): X is A or G
  MISC_FEATURE (23)..(23): X is A and G
  MISC_FEATURE (24)..(24): X is D and E for acidic amino acids
  MISC_FEATURE (25)..(25): X is A and G
  MISC_FEATURE (26)..(26): X is N or Q for amidated amino acids
  MISC_FEATURE (27)..(27): X is D and E for acidic amino acids
  MISC_FEATURE (28)..(28): X is D and E for acidic amino acids
  MISC_FEATURE (29)..(29): X is K, R or H for basic amino acids
  MISC_FEATURE (30)..(30): X is A and G
  MISC_FEATURE (31)..(31): X is A and G
  MISC_FEATURE (32)..(32): X is I, L or V
  MISC_FEATURE (33)..(33): X is I, L or V
  MISC_FEATURE (34)..(34): X is C or S
  MISC_FEATURE (35)..(35): X is T or S
  MISC_FEATURE (36)..(36): X is A or G
  MISC_FEATURE (37)..(37): X is I, L or V
  MISC_FEATURE (38)..(38): X is I, L or V

SEQ ID NO: 267 - protein, 51 aa, Artificial
  Completely synthesized peptide construct
NMYAMMIARFKMFPEVKEKGMAALPRLIAFTSEGGGDGQEEKAGVVSTGLI

SEQ ID NO: 268 - protein, 51 aa, Artificial; identical to SEQ ID NO: 188
  peptide construct
  MISC_FEATURE (1)..(1): X is N or Q for amidated amino acids
  MISC_FEATURE (2)..(2): X is M or Nle
  MISC_FEATURE (3)..(3): X is F, W or Y for aromatic amino acids
  MISC_FEATURE (4)..(4): X is A or G
  MISC_FEATURE (5)..(5): X is M or Nle
  MISC_FEATURE (6)..(6): X is M or Nle
  MISC_FEATURE (7)..(7): X is I, L or V
  MISC_FEATURE (8)..(8): X is A or G
  MISC_FEATURE (9)..(9): X is K, R or H for basic amino acids
  MISC_FEATURE (10)..(10): X is F, W or Y for aromatic amino acids
  MISC_FEATURE (11)..(11): X is K, R or H for basic amino acids
  MISC_FEATURE (12)..(12): X is M or Nle
  MISC_FEATURE (13)..(13): X is F, W or Y for aromatic amino acids
  MISC_FEATURE (14)..(14): X is F or P
  MISC_FEATURE (15)..(15): X is D and E for acidic amino acids
  MISC_FEATURE (16)..(16): X is I, L or V
  MISC_FEATURE (17)..(17): X is K, R or H for basic amino acids
  MISC_FEATURE (18)..(18): X is D and E for acidic amino acids
  MISC_FEATURE (19)..(19): X is K, R or H for basic amino acids
  MISC_FEATURE (20)..(20): X is A or G
  MISC_FEATURE (21)..(21): X is M or Nle
  MISC_FEATURE (22)..(22): X is A or G
  MISC_FEATURE (23)..(23): X is A or G
  MISC_FEATURE (24)..(24): X is I, L or V
  MISC_FEATURE (25)..(25): X is F or P
  MISC_FEATURE (26)..(26): X is K, R or H for basic amino acids
  MISC_FEATURE (27)..(27): X is I, L or V
  MISC_FEATURE (28)..(28): X is I, L or V
  MISC_FEATURE (29)..(29): X is A or G
  MISC_FEATURE (30)..(30): X is F, W or Y for aromatic amino acids
  MISC_FEATURE (31)..(31): X is T or S
  MISC_FEATURE (32)..(32): X is C or S
  MISC_FEATURE (33)..(33): X is D and E for acidic amino acids
  MISC_FEATURE (34)..(34): X is A and G
  MISC_FEATURE (35)..(35): X is A or G
  MISC_FEATURE (36)..(36): X is A and G
  MISC_FEATURE (37)..(37): X is D and E for acidic amino acids
  MISC_FEATURE (38)..(38): X is A and G
  MISC_FEATURE (39)..(39): X is N or Q for amidated amino acids
  MISC_FEATURE (40)..(40): X is D and E for acidic amino acids
  MISC_FEATURE (41)..(41): X is D and E for acidic amino acids
  MISC_FEATURE (42)..(42): X is K, R or H for basic amino acids
  MISC_FEATURE (43)..(43): X is A and G
  MISC_FEATURE (44)..(44): X is A and G
  MISC_FEATURE (45)..(45): X is I, L or V
  MISC_FEATURE (46)..(46): X is I, L or V
  MISC_FEATURE (47)..(47): X is C or S
  MISC_FEATURE (48)..(48): X is T or S
  MISC_FEATURE (49)..(49): X is A and G
  MISC_FEATURE (50)..(50): X is I, L or V
  MISC_FEATURE (51)..(51): X is I, L or V

SEQ ID NO: 269 - protein, 31 aa, Artificial
  Completely synthesized peptide construct
IAFTSEHSHFSLKGGGDGQEEKAGVVSTGLI

SEQ ID NO: 270 - protein, 31 aa, Artificial; identical to SEQ ID NO: 130
  peptide construct
  MISC_FEATURE (1)..(1): X is I, L or V
  MISC_FEATURE (2)..(2): X is A or G
  MISC_FEATURE (3)..(3): X is F, W or Y for aromatic amino acids
  MISC_FEATURE (4)..(4): X is T or S
  MISC_FEATURE (5)..(5): X is C or S
  MISC_FEATURE (6)..(6): X is D and E for acidic amino acids
  MISC_FEATURE (7)..(7): X is K, R or H for basic amino acids
  MISC_FEATURE (8)..(8): X is C or S
  MISC_FEATURE (9)..(9): X is K, R or H for basic amino acids
  MISC_FEATURE (10)..(10): X is F, W or Y for aromatic amino acids
  MISC_FEATURE (11)..(11): X is C or S
  MISC_FEATURE (12)..(12): X is I, L or V
  MISC_FEATURE (13)..(13): X is K, R or H for basic amino acids
  MISC_FEATURE (14)..(14): X is A and G
  MISC_FEATURE (15)..(15): X is A or G
  MISC_FEATURE (16)..(16): X is A and G
  MISC_FEATURE (17)..(17): X is D and E for acidic amino acids
  MISC_FEATURE (18)..(18): X is A and G
  MISC_FEATURE (19)..(19): X is N or Q for amidated amino acids
  MISC_FEATURE (20)..(20): X is D or E for acidic amino acids
  MISC_FEATURE (21)..(21): X is D and E for acidic amino acids
  MISC_FEATURE (22)..(22): X is K, R or H for basic amino acids
  MISC_FEATURE (23)..(23): X is A and G
  MISC_FEATURE (24)..(24): X is A and G
  MISC_FEATURE (25)..(25): X is I, L or V
  MISC_FEATURE (26)..(26): X is I, L or V
  MISC_FEATURE (27)..(27): X is C or S
  MISC_FEATURE (28)..(28): X is T or S
  MISC_FEATURE (29)..(29): X is A or G
  MISC_FEATURE (30)..(30): X is I, L or V
  MISC_FEATURE (31)..(31): X is I, L or V

SEQ ID NO: 271 - protein, 39 aa, Artificial; identical to SEQ ID NO: 263
  Completely synthesized peptide construct

SEQ ID NO: 272 - protein, 39 aa, Artificial; identical to SEQ ID NO: 184
  peptide construct
  MISC_FEATURE (1)..(1): X is M or Nle
  MISC_FEATURE (2)..(2): X is D and E for acidic amino acids
  MISC_FEATURE (3)..(3): X is F, W or Y for aromatic amino acids
  MISC_FEATURE (4)..(4): X is F, W or Y for aromatic amino acids
  MISC_FEATURE (5)..(5): X is C or S
  MISC_FEATURE (6)..(6): X is I, L or V
  MISC_FEATURE (7)..(7): X is D and E for acidic amino acids
  MISC_FEATURE (8)..(8): X is K, R or H for basic amino acids
  MISC_FEATURE (9)..(9): X is D and E for acidic amino acids
  MISC_FEATURE (10)..(10): X is K, R or H for basic amino acids
  MISC_FEATURE (11)..(11): X is F or P
  MISC_FEATURE (12)..(12): X is F or P
  MISC_FEATURE (13)..(13): X is F or P
  MISC_FEATURE (14)..(14): X is A or G
  MISC_FEATURE (15)..(15): X is T or S
  MISC_FEATURE (16)..(16): X is F or P
  MISC_FEATURE (17)..(17): X is T or S
  MISC_FEATURE (18)..(18): X is C or S
  MISC_FEATURE (19)..(19): X is I, L or V
  MISC_FEATURE (20)..(20): X is T or S
  MISC_FEATURE (21)..(21): X is T or S
  MISC_FEATURE (22)..(22): X is A and G
  MISC_FEATURE (23)..(23): X is A or G
  MISC_FEATURE (24)..(24): X is A and G
  MISC_FEATURE (25)..(25): X is D and E for acidic amino acids
  MISC_FEATURE (26)..(26): X is A and G
  MISC_FEATURE (27)..(27): X is N or Q for amidated amino acids
  MISC_FEATURE (28)..(28): X is D and E for acidic amino acids
  MISC_FEATURE (29)..(29): X is D and E for acidic amino acids
  MISC_FEATURE (30)..(30): X is K, R or H for basic amino acids
  MISC_FEATURE (31)..(31): X is A and G
  MISC_FEATURE (32)..(32): X is A and G
  MISC_FEATURE (33)..(33): X is I, l or V
  MISC_FEATURE (34)..(34): X is I, L or V
  MISC_FEATURE (35)..(35): X is C or S
  MISC_FEATURE (36)..(36): X is T or S
  MISC_FEATURE (37)..(37): X is A and G
  MISC_FEATURE (38)..(38): X is I, L or V
  MISC_FEATURE (39)..(39): X is I, L or V

SEQ ID NO: 273 - protein, 28 aa, Artificial
  Completely synthesized peptide construct
ERPTLAFLQDGGGDGQEEKAGVVSTGLI

SEQ ID NO: 274 - protein, 28 aa, Artificial
  peptide construct
  MISC_FEATURE (1)..(1): X is D and E for acidic amino acids
  MISC_FEATURE (2)..(2): X is K, R or H for basic amino acids
  MISC_FEATURE (3)..(3): X is F or P
  MISC_FEATURE (4)..(4): X is T or S
  MISC_FEATURE (5)..(5): X is I, L or V
  MISC_FEATURE (6)..(6): X is A or G
  MISC_FEATURE (7)..(7): X is F, W or Y for aromatic amino acids
  MISC_FEATURE (8)..(8): X is I, L or V
  MISC_FEATURE (9)..(9): X is N or Q for amidated amino acids
  MISC_FEATURE (10)..(10): X is D and E for acidic amino acids
  MISC_FEATURE (11)..(11): X is A and G
  MISC_FEATURE (12)..(12): X is A or G
  MISC_FEATURE (13)..(13): X is A and G
  MISC_FEATURE (14)..(14): X is D and E for acidic amino acids
  MISC_FEATURE (15)..(15): X is A and G
  MISC_FEATURE (16)..(16): X is N or Q for amidated amino acids
  MISC_FEATURE (17)..(17): X is D and E for acidic amino acids
  MISC_FEATURE (18)..(18): X is D and E for acidic amino acids
  MISC_FEATURE (19)..(19): X is K, R or H for basic amino acids
  MISC_FEATURE (20)..(20): X is A and G
  MISC_FEATURE (21)..(21): X is A and G
  MISC_FEATURE (22)..(22): X is I, L or V
  MISC_FEATURE (23)..(23): X is I, L or V
  MISC_FEATURE (24)..(24): X is C or S
  MISC_FEATURE (25)..(25): X is T or S
  MISC_FEATURE (26)..(26): X is A or G
  MISC_FEATURE (27)..(27): X is I, L or V
  MISC_FEATURE (28)..(28): X is I, L or V
XXXXXXXXXXXXXXXXXXXXXXXXXXXX

SEQ ID NO: 275 - protein, 28 aa, Artificial
  Completely synthesized peptide construct
DRSTKVIDFHGGGDGQEEKAGVVSTGLI

SEQ ID NO: 276 - protein, 28 aa, Artificial
  peptide construct
  MISC_FEATURE (1)..(1): X is D and E for acidic amino acids
  MISC_FEATURE (2)..(2): X is K, R or H for basic amino acids
  MISC_FEATURE (3)..(3): X is C or S
  MISC_FEATURE (4)..(4): X is T or S
  MISC_FEATURE (5)..(5): X is K, R or H for basic amino acids
  MISC_FEATURE (6)..(6): X is I, L or V
  MISC_FEATURE (7)..(7): X is I, L or V
  MISC_FEATURE (8)..(8): X is D and E for acidic amino acids
  MISC_FEATURE (9)..(9): X is F, W  or Y for aromatic amino acids
  MISC_FEATURE (10)..(10): X is K, R or H for basic amino acids
  MISC_FEATURE (11)..(11): X is A and G
  MISC_FEATURE (12)..(12): X is  A or G
  MISC_FEATURE (13)..(13): X is A and G
  MISC_FEATURE (14)..(14): X is D and E for acidic amino acids
  MISC_FEATURE (15)..(15): X is A and G
  MISC_FEATURE (16)..(16): X is N or Q for amidated amino acids
  MISC_FEATURE (17)..(17): X is D and E for acidic amino acids
  MISC_FEATURE (18)..(18): X is D and E for acidic amino acids
  MISC_FEATURE (19)..(19): X is K, R or H for basic amino acids
  MISC_FEATURE (20)..(20): X is A and G
  MISC_FEATURE (21)..(21): X is A and G
  MISC_FEATURE (22)..(22): X is I, L or V
  MISC_FEATURE (23)..(23): X is I, L or V
  MISC_FEATURE (24)..(24): X is C or S
  MISC_FEATURE (25)..(25): X is T or S
  MISC_FEATURE (26)..(26): X is A or G
  MISC_FEATURE (27)..(27): X is I, L or V
  MISC_FEATURE (28)..(28): X is I, L or V
XXXXXXXXXXXXXXXXXXXXXXXXXXXX

SEQ ID NO: 277 - protein, 31 aa, Artificial
  Completely synthesized peptide construct
IAGFKGEQGPKGEGGGDGQEEKAGVVSTGLI

SEQ ID NO: 278 - protein, 31 aa, Artificial; identical to SEQ ID NO: 130
  peptide construct
  MISC_FEATURE (1)..(1): X is I, L or V
  MISC_FEATURE (2)..(2): X is A or G
  MISC_FEATURE (3)..(3): X is A or G
  MISC_FEATURE (4)..(4): X is F, W or Y for aromatic amino acids
  MISC_FEATURE (5)..(5): X is K, R or H for basic amino acids
  MISC_FEATURE (6)..(6): X is A or G
  MISC_FEATURE (7)..(7): X is D and E for acidic amino acids
  MISC_FEATURE (8)..(8): X is N or Q for amidated amino acids
  MISC_FEATURE (9)..(9): X is A or G
  MISC_FEATURE (10)..(10): X is F or P
  MISC_FEATURE (11)..(11): X is K, R or H for basic amino acids
  MISC_FEATURE (12)..(12): X is A or G
  MISC_FEATURE (13)..(13): X is D and E for acidic amino acids
  MISC_FEATURE (14)..(14): X is A and G
  MISC_FEATURE (15)..(15): X is A for G
  MISC_FEATURE (16)..(16): X is A and G
  MISC_FEATURE (17)..(17): X is D and E for acidic amino acids
  MISC_FEATURE (18)..(18): X is A and G
  MISC_FEATURE (19)..(19): X is N or Q for amidated amino acids
  MISC_FEATURE (20)..(20): X is D and E for acidic amino acids
  MISC_FEATURE (21)..(21): X is D and E for acidic amino acids
  MISC_FEATURE (22)..(22): X is K, R or H for basic amino acids
  MISC_FEATURE (23)..(23): X is A and G
  MISC_FEATURE (24)..(24): X is A and G
  MISC_FEATURE (25)..(25): X is I, L or V
  MISC_FEATURE (26)..(26): X is I, L or V
  MISC_FEATURE (27)..(27): X is C or S
  MISC_FEATURE (28)..(28): X is T or S
  MISC_FEATURE (29)..(29): X is A and G
  MISC_FEATURE (30)..(30): X is I, L or V
  MISC_FEATURE (31)..(31): X is I, L or V

SEQ ID NO: 279 - protein, 18 aa, Artificial
  Completely synthesized peptide construct
GGGDGQEEKAGVVSTGLI

SEQ ID NO: 280 - protein, 35 aa, Artificial; identical to SEQ ID NO: 206
  peptide construct
  MISC_FEATURE (1)..(1): X is T or S
  MISC_FEATURE (2)..(2): X is I, L or V
  MISC_FEATURE (3)..(3): X is K, R or H for basic amino acids
  MISC_FEATURE (4)..(4): X is I, L or V
  MISC_FEATURE (5)..(5): X is T or S
  MISC_FEATURE (6)..(6): X is I, L or V
  MISC_FEATURE (7)..(7): X is A and G
  MISC_FEATURE (8)..(8): X is I, L or V
  MISC_FEATURE (9)..(9): X is K, R or H for basic amino acids
  MISC_FEATURE (10)..(10): X is N or Q for amidated amino acids
  MISC_FEATURE (11)..(11): X is K, R or H for basic amino acids
  MISC_FEATURE (12)..(12): X is A and G
  MISC_FEATURE (13)..(13): X is D and E for acidic amino acids
  MISC_FEATURE (14)..(14): X is F or P
  MISC_FEATURE (15)..(15): X is K, R or H for basic amino acids
  MISC_FEATURE (16)..(16): X is N or Q for amidated amino acids
  MISC_FEATURE (17)..(17): X is T or S
  MISC_FEATURE (18)..(18): X is A and G
  MISC_FEATURE (19)..(19): X is A and G
  MISC_FEATURE (20)..(20): X is A and G
  MISC_FEATURE (21)..(21): X is D and E for acidic amino acids
  MISC_FEATURE (22)..(22): X is A and G
  MISC_FEATURE (23)..(23): X is N or Q for amidated amino acids
  MISC_FEATURE (24)..(24): X is D and E for acidic amino acids
  MISC_FEATURE (25)..(25): X is D and E for acidic amino acids
  MISC_FEATURE (26)..(26): X is K, R or H for basic amino acids
  MISC_FEATURE (27)..(27): X is A and G
  MISC_FEATURE (28)..(28): X is A and G
  MISC_FEATURE (29)..(29): X is I, L or V
  MISC_FEATURE (30)..(30): X is I, L or V
  MISC_FEATURE (31)..(31): X is C or S
  MISC_FEATURE (32)..(32): X is T or S
  MISC_FEATURE (33)..(33): X is A and G
  MISC_FEATURE (34)..(34): X is I, L or V
  MISC_FEATURE (35)..(35): X is I, L or V

SEQ ID NO: 281 - protein, 26 aa, Artificial
  Completely synthesized peptide construct
KNIVTPRTGGGDGQEEKAGVVSTGLI

SEQ ID NO: 282 - protein, 26 aa, Artificial
  peptide construct
  MISC_FEATURE (1)..(1): X is K, R or H for basic amino acids
  MISC_FEATURE (2)..(2): X is N or Q for amidated amino acids
  MISC_FEATURE (3)..(3): X is I, L or V
  MISC_FEATURE (4)..(4): X is I, L or V
  MISC_FEATURE (5)..(5): X is T or S
  MISC_FEATURE (6)..(6): X is F or  P
  MISC_FEATURE (7)..(7): X is K, R or H for basic amino acids
  MISC_FEATURE (8)..(8): X is T or S
  MISC_FEATURE (9)..(9): X is A and G
  MISC_FEATURE (10)..(10): X is A or G
  MISC_FEATURE (11)..(11): X is A and G
  MISC_FEATURE (12)..(12): X is D and E for acidic amino acids
  MISC_FEATURE (13)..(13): X is A and G
  MISC_FEATURE (14)..(14): X is N or Q for amidated amino acids
  MISC_FEATURE (15)..(15): X is D and E for acidic amino acids
  MISC_FEATURE (16)..(16): X is D and E for acidic amino acids
  MISC_FEATURE (17)..(17): X is K, R or H for basic amino acids
  MISC_FEATURE (18)..(18): X is A and G
  MISC_FEATURE (19)..(19): X is A and G
  MISC_FEATURE (20)..(20): X is I, L or V
  MISC_FEATURE (21)..(21): X is I, L or V
  MISC_FEATURE (22)..(22): X is C or S
  MISC_FEATURE (23)..(23): X is T or S
  MISC_FEATURE (24)..(24): X is A and G
  MISC_FEATURE (25)..(25): X is I, L or V
  MISC_FEATURE (26)..(26): X is I, L or V
XXXXXXXXXXXXXXXXXXXXXXXXXX

SEQ ID NO: 283 - protein, 33 aa, Artificial
  Completely synthesized peptide construct
GDKVSFFCKNKEKKCGGGDGQEEKAGVVSTGLI

SEQ ID NO: 284 - protein, 33 aa, Artificial; identical to SEQ ID NO: 99
  peptide construct
  MISC_FEATURE (1)..(1): X is A or G
  MISC_FEATURE (2)..(2): X is D and E for acidic amino acids
  MISC_FEATURE (3)..(3): X is K, R or H for basic amino acids
  MISC_FEATURE (4)..(4): X is I, L or V
  MISC_FEATURE (5)..(5): X is C or S
  MISC_FEATURE (6)..(6): X is F, W or Y for aromatic amino acids
  MISC_FEATURE (7)..(7): X is F, W or Y for aromatic amino acids
  MISC_FEATURE (8)..(8): X is C or S
  MISC_FEATURE (9)..(9): X is K, R or H for basic amino acids
  MISC_FEATURE (10)..(10): X is N or Q for amidated amino acids
  MISC_FEATURE (11)..(11): X is K, R or H for basic amino acids
  MISC_FEATURE (12)..(12): X is D and E for acidic amino acids
  MISC_FEATURE (13)..(13): X is K, R or H for basic amino acids
  MISC_FEATURE (14)..(14): X is K, R or H for basic amino acids
  MISC_FEATURE (15)..(15): X is C or S
  MISC_FEATURE (16)..(16): X is A and G
  MISC_FEATURE (17)..(17): X is A or G
  MISC_FEATURE (18)..(18): X is A and G
  MISC_FEATURE (19)..(19): X is D and E for acidic amino acids
  MISC_FEATURE (20)..(20): X is A and G
  MISC_FEATURE (21)..(21): X is N or Q for amidated amino acids
  MISC_FEATURE (22)..(22): X is D and E for acidic amino acids
  MISC_FEATURE (23)..(23): X is D and E for acidic amino acids
  MISC_FEATURE (24)..(24): X is K, R or H for basic amino acids
  MISC_FEATURE (25)..(25): X is A and G
  MISC_FEATURE (26)..(26): X is A and G
  MISC_FEATURE (27)..(27): X is I, L or V
  MISC_FEATURE (28)..(28): X is I, L or V
  MISC_FEATURE (29)..(29): X is C or S
  MISC_FEATURE (30)..(30): X is T or S
  MISC_FEATURE (31)..(31): X is A and G
  MISC_FEATURE (32)..(32): X is I, L or V
  MISC_FEATURE (33)..(33): X is I, L or V

SEQ ID NO: 285 - protein, 35 aa, Artificial
  Completely synthesized peptide construct
EIIVTHFPFDEQNCSMKGGGDGQEEKAGVVSTGLI

SEQ ID NO: 286 - protein, 35 aa, Artificial; identical to SEQ ID NO: 206
  peptide construct
  MISC_FEATURE (1)..(1): X is D and E for acidic amino acids
  MISC_FEATURE (2)..(2): X is I, L or V
  MISC_FEATURE (3)..(3): X is I, L or V
  MISC_FEATURE (4)..(4): X is I, L or V
  MISC_FEATURE (5)..(5): X is T or S
  MISC_FEATURE (6)..(6): X is K, R or H for basic amino acids
  MISC_FEATURE (7)..(7): X is F, W or Y for aromatic amino acids
  MISC_FEATURE (8)..(8): X is F or P
  MISC_FEATURE (9)..(9): X is F, W or Y for aromatic amino acids
  MISC_FEATURE (10)..(10): X is D and E for acidic amino acids
  MISC_FEATURE (11)..(11): X is D and E for acidic amino acids
  MISC_FEATURE (12)..(12): X is N or Q for amidated amino acids
  MISC_FEATURE (13)..(13): X is N or Q for amidated amino acids
  MISC_FEATURE (14)..(14): X is C or S
  MISC_FEATURE (15)..(15): X is C or S
  MISC_FEATURE (16)..(16): X is M or Nle
  MISC_FEATURE (17)..(17): X is K, R or H for basic amino acids
  MISC_FEATURE (18)..(18): X is A and G
  MISC_FEATURE (19)..(19): X is A or G
  MISC_FEATURE (20)..(20): X is A and G
  MISC_FEATURE (21)..(21): X is D and E for acidic amino acids
  MISC_FEATURE (22)..(22): X is A and G
  MISC_FEATURE (23)..(23): X is N or Q for amidated amino acids
  MISC_FEATURE (24)..(24): X is  D and E for acidic amino acids
  MISC_FEATURE (25)..(25): X is D and E for acidic amino acids
  MISC_FEATURE (26)..(26): X is K, R or H for basic amino acids
  MISC_FEATURE (27)..(27): X is A and G
  MISC_FEATURE (28)..(28): X is A and G
  MISC_FEATURE (29)..(29): X is I, L or V
  MISC_FEATURE (30)..(30): X is I, L or V
  MISC_FEATURE (31)..(31): X is C or S
  MISC_FEATURE (32)..(32): X is T or S
  MISC_FEATURE (33)..(33): X is A or G
  MISC_FEATURE (34)..(34): X is I, L or V
  MISC_FEATURE (35)..(35): X is I, L or V

SEQ ID NO: 287 - protein, 31 aa, Artificial
  Completely synthesized peptide construct
VHFFKNIVTPRTPGGGDGQEEKAGVVSTGLI

SEQ ID NO: 288 - protein, 31 aa, Artificial; identical to SEQ ID NO: 130
  peptide construct
  MISC_FEATURE (1)..(1): X is I, L or V
  MISC_FEATURE (2)..(2): X is K, R or H for basic amino acids
  MISC_FEATURE (3)..(3): X is F, W or Y for aromatic amino acids
  MISC_FEATURE (4)..(4): X is F, W or Y for aromatic amino acids
  MISC_FEATURE (5)..(5): X is K, R or H for basic amino acids
  MISC_FEATURE (6)..(6): X is N or Q for amidated amino acids
  MISC_FEATURE (7)..(7): X is I, L or V
  MISC_FEATURE (8)..(8): X is I, L or V
  MISC_FEATURE (9)..(9): X is T or S
  MISC_FEATURE (10)..(10): X is F or P
  MISC_FEATURE (11)..(11): X is K, R or H for basic amino acids
  MISC_FEATURE (12)..(12): X is T or S
  MISC_FEATURE (13)..(13): X is F or P
  MISC_FEATURE (14)..(14): X is A and G
  MISC_FEATURE (15)..(15): X is A or G
  MISC_FEATURE (16)..(16): X is A and G
  MISC_FEATURE (17)..(17): X is D and E for acidic amino acids
  MISC_FEATURE (18)..(18): X is A and G
  MISC_FEATURE (19)..(19): X is N or Q for amidated amino acids
  MISC_FEATURE (20)..(20): X is D and E for acidic amino acids
  MISC_FEATURE (21)..(21): X is D and E for acidic amino acids
  MISC_FEATURE (22)..(22): X is K, R or H for basic amino acids
  MISC_FEATURE (23)..(23): X is A and G
  MISC_FEATURE (24)..(24): X is A and G
  MISC_FEATURE (25)..(25): X is I, L or V
  MISC_FEATURE (26)..(26): X is I, L or V
  MISC_FEATURE (27)..(27): X is C or S
  MISC_FEATURE (28)..(28): X is T or S
  MISC_FEATURE (29)..(29): X is A and G
  MISC_FEATURE (30)..(30): X is I, L or V
  MISC_FEATURE (31)..(31): X is I, L or V

SEQ ID NO: 289 - protein, 36 aa, Artificial
  Completely synthesized peptide construct
YQQLNSERVGVPNENIENGGGDGQEEKAGVVSTGLI

SEQ ID NO: 290 - protein, 35 aa, Artificial; identical to SEQ ID NO: 206
  peptide construct
  MISC_FEATURE (1)..(1): X is F, W or Y for aromatic amino acids
  MISC_FEATURE (2)..(2): X is N or Q for amidated amino acids
  MISC_FEATURE (3)..(3): X is N or Q for amidated amino acids
  MISC_FEATURE (4)..(4): X is I, L or V
  MISC_FEATURE (5)..(5): X is N or Q for amidated amino acids
  MISC_FEATURE (6)..(6): X is C or S
  MISC_FEATURE (7)..(7): X is D and E for acidic amino acids
  MISC_FEATURE (8)..(8): X is K, R or H for basic amino acids
  MISC_FEATURE (9)..(9): X is A or G
  MISC_FEATURE (10)..(10): X is I, L or V
  MISC_FEATURE (11)..(11): X is F or P
  MISC_FEATURE (12)..(12): X is N or Q for amidated amino acids
  MISC_FEATURE (13)..(13): X is D and E for acidic amino acids
  MISC_FEATURE (14)..(14): X is N or Q for amidated amino acids
  MISC_FEATURE (15)..(15): X is I, L or V
  MISC_FEATURE (16)..(16): X is D and E for acidic amino acids
  MISC_FEATURE (17)..(17): X is N or Q for amidated amino acids
  MISC_FEATURE (18)..(18): X is A and G
  MISC_FEATURE (19)..(19): X is A or G
  MISC_FEATURE (20)..(20): X is  A and G
  MISC_FEATURE (21)..(21): X is D and E for acidic amino acids
  MISC_FEATURE (22)..(22): X is A and G
  MISC_FEATURE (23)..(23): X is N or Q for amidated amino acids
  MISC_FEATURE (24)..(24): X is D and E for acidic amino acids
  MISC_FEATURE (25)..(25): X is D and E for acidic amino acids
  MISC_FEATURE (26)..(26): X is K, R or H for basic amino acids
  MISC_FEATURE (27)..(27): X is A and G
  MISC_FEATURE (28)..(28): X is A and G
  MISC_FEATURE (29)..(29): X is I, L or V
  MISC_FEATURE (30)..(30): X is I, L or V
  MISC_FEATURE (31)..(31): X is C or S
  MISC_FEATURE (32)..(32): X is T or S
  MISC_FEATURE (33)..(33): X is A or G
  MISC_FEATURE (34)..(34): X is I, L or V
  MISC_FEATURE (35)..(35): X is I, L or V

SEQ ID NO: 291 - protein, 31 aa, Artificial
  Completely synthesized peptide construct
VFIKRVSNVIIHGGGGDGQEEKAGVVSTGLI

SEQ ID NO: 292 - protein, 31 aa, Artificial; identical to SEQ ID NO: 130
  peptide construct
  MISC_FEATURE (1)..(1): X is I, L or V
  MISC_FEATURE (2)..(2): X is F, W or Y for aromatic amino acids
  MISC_FEATURE (3)..(3): X is I, L or V
  MISC_FEATURE (4)..(4): X is K,  R or H for basic amino acids
  MISC_FEATURE (5)..(5): X is K, R or H for basic amino acids
  MISC_FEATURE (6)..(6): X is I, L or V
  MISC_FEATURE (7)..(7): X is C or S
  MISC_FEATURE (8)..(8): X is N or Q for amidated amino acids
  MISC_FEATURE (9)..(9): X is I, L or V
  MISC_FEATURE (10)..(10): X is I, L or V
  MISC_FEATURE (11)..(11): X is I, L or V
  MISC_FEATURE (12)..(12): X is K, R or H for basic amino acids
  MISC_FEATURE (13)..(13): X is A or G
  MISC_FEATURE (14)..(14): X is A and G
  MISC_FEATURE (15)..(15): X is A or G
  MISC_FEATURE (16)..(16): X is A and G
  MISC_FEATURE (17)..(17): X is D and E for acidic amino acids
  MISC_FEATURE (18)..(18): X is A and G
  MISC_FEATURE (19)..(19): X is N or Q for amidated amino acids
  MISC_FEATURE (20)..(20): X is D and E for acidic amino acids
  MISC_FEATURE (21)..(21): X is D and E for acidic amino acids
  MISC_FEATURE (22)..(22): X is K, R or H for basic amino acids
  MISC_FEATURE (23)..(23): X is A and G
  MISC_FEATURE (24)..(24): X is A and G
  MISC_FEATURE (25)..(25): X is I, L or V
  MISC_FEATURE (26)..(26): X is I, L or V
  MISC_FEATURE (27)..(27): X is C or S
  MISC_FEATURE (28)..(28): X is T or S
  MISC_FEATURE (29)..(29): X is A or G
  MISC_FEATURE (30)..(30): X is I, L or V
  MISC_FEATURE (31)..(31): X is I, L or V

SEQ ID NO: 293 - protein, 33 aa, Artificial
  Completely synthesized peptide construct
MKVTVAFNQFGPNRRGGGDGQEEKAGVVSTGLI

SEQ ID NO: 294 - protein, 33 aa, Artificial; identical to SEQ ID NO: 99
  peptide construct
  MISC_FEATURE (1)..(1): X is M or Nle
  MISC_FEATURE (2)..(2): X is K, R or H for basic amino acids
  MISC_FEATURE (3)..(3): X is I, L or V
  MISC_FEATURE (4)..(4): X is Tor S
  MISC_FEATURE (5)..(5): X is I, L or V
  MISC_FEATURE (6)..(6): X is A or G
  MISC_FEATURE (7)..(7): X is F, W or Y for amidated amino acids
  MISC_FEATURE (8)..(8): X is N or Q for amidated amion acids
  MISC_FEATURE (9)..(9): X is N or Q for amidated amino acids
  MISC_FEATURE (10)..(10): X is F, W or Y for aromatic amino acids
  MISC_FEATURE (11)..(11): X is A or G
  MISC_FEATURE (12)..(12): X is F or P
  MISC_FEATURE (13)..(13): X is N or Q for amidated amino acids
  MISC_FEATURE (14)..(14): X is K, R or H for basic amino acids
  MISC_FEATURE (15)..(15): X is K, R or H for basic amino acids
  MISC_FEATURE (16)..(16): X is A and G
  MISC_FEATURE (17)..(17): X is A or G
  MISC_FEATURE (18)..(18): X is A and G
  MISC_FEATURE (19)..(19): X is D and E for acidic amino acids
  MISC_FEATURE (20)..(20): X is A and G
  MISC_FEATURE (21)..(21): X is N or Q for amidated amino acids
  MISC_FEATURE (22)..(22): X is D and E for acidic amino acids
  MISC_FEATURE (23)..(23): X is D and E for acidic amino acids
  MISC_FEATURE (24)..(24): X is K, R or H for basic amino acids
  MISC_FEATURE (25)..(25): X is A and G
  MISC_FEATURE (26)..(26): X is A and G
  MISC_FEATURE (27)..(27): X is  I, L or V
  MISC_FEATURE (28)..(28): X is I, L or V
  MISC_FEATURE (29)..(29): X is C or S
  MISC_FEATURE (30)..(30): X is T or S
  MISC_FEATURE (31)..(31): X is A or G
  MISC_FEATURE (32)..(32): X is I, L or V
  MISC_FEATURE (33)..(33): X is I, L or V

SEQ ID NO: 295 - protein, 33 aa, Artificial
  Completely synthesized peptide construct
IASRRVDGIIAAYQNGGGDGQEEKAGVVSTGLI

SEQ ID NO: 296 - protein, 33 aa, Artificial; identical to SEQ ID NO: 99
  peptide construct
  MISC_FEATURE (1)..(1): X is I, L or V
  MISC_FEATURE (2)..(2): X is A or G
  MISC_FEATURE (3)..(3): X is C or S
  MISC_FEATURE (4)..(4): X is K, R or H for basic amino acids
  MISC_FEATURE (5)..(5): X is K, R or H for basic amino acids
  MISC_FEATURE (6)..(6): X is I, L or V
  MISC_FEATURE (7)..(7): X is D and E for acidic amino acids
  MISC_FEATURE (8)..(8): X is A or G
  MISC_FEATURE (9)..(9): X is I, L or V
  MISC_FEATURE (10)..(10): X is I, L or V
  MISC_FEATURE (11)..(11): X is A or G
  MISC_FEATURE (12)..(12): X is A or G
  MISC_FEATURE (13)..(13): X is F, W or Y for aromatic amino acids
  MISC_FEATURE (14)..(14): X is N or Q for amidated amino acids
  MISC_FEATURE (15)..(15): X is N or Q for amidated amino acids
  MISC_FEATURE (16)..(16): X is A and G
  MISC_FEATURE (17)..(17): X is A or G
  MISC_FEATURE (18)..(18): X is A and G
  MISC_FEATURE (19)..(19): X is D and E for acidic amino acids
  MISC_FEATURE (20)..(20): X is A and G
  MISC_FEATURE (21)..(21): X is N or Q for amidated amino acids
  MISC_FEATURE (22)..(22): X is D and E for acidic amino acids
  MISC_FEATURE (23)..(23): X is D and E for acidic amino acids
  MISC_FEATURE (24)..(24): X is K, R or H for basic amino acids
  MISC_FEATURE (25)..(25): X is A and G
  MISC_FEATURE (26)..(26): X is A and G
  MISC_FEATURE (27)..(27): X is I, L or V
  MISC_FEATURE (28)..(28): X is I, L or V
  MISC_FEATURE (29)..(29): X is C or S
  MISC_FEATURE (30)..(30): X is T or S
  MISC_FEATURE (31)..(31): X is A or G
  MISC_FEATURE (32)..(32): X is I, L or V
  MISC_FEATURE (33)..(33): X is I, L or V

SEQ ID NO: 297 - protein, 37 aa, Artificial
  Completely synthesized peptide construct
IDIFASKNFHLQKNTIGTGGGGDGQEEKAGVVSTGLI

SEQ ID NO: 298 - protein, 37 aa, Artificial; identical to SEQ ID NO: 158
  peptide construct
  MISC_FEATURE (1)..(1): X is I, L or V
  MISC_FEATURE (2)..(2): X is D and E for acidic amino acids
  MISC_FEATURE (3)..(3): X is I, L or V
  MISC_FEATURE (4)..(4): X is F, W or  Y for aromatic amino acids
  MISC_FEATURE (5)..(5): X is A or G
  MISC_FEATURE (6)..(6): X is C or S
  MISC_FEATURE (7)..(7): X is K, R or H for basic amino acids
  MISC_FEATURE (8)..(8): X is N or Q for amidated amino acids
  MISC_FEATURE (9)..(9): X is F, W or Y for aromatic amino acids
  MISC_FEATURE (10)..(10): X is K, R or H for basic amino acids
  MISC_FEATURE (11)..(11): X is I, L or V
  MISC_FEATURE (12)..(12): X is N or Q for amidated amino acids
  MISC_FEATURE (13)..(13): X is K, R or H for basic amino acids
  MISC_FEATURE (14)..(14): X is N or Q for amidated amino acids
  MISC_FEATURE (15)..(15): X is T or S
  MISC_FEATURE (16)..(16): X is I, L or V
  MISC_FEATURE (17)..(17): X is A or G
  MISC_FEATURE (18)..(18): X is T or S
  MISC_FEATURE (19)..(19): X is A or G
  MISC_FEATURE (20)..(20): X is A and G
  MISC_FEATURE (21)..(21): X is A or G
  MISC_FEATURE (22)..(22): X is A and G
  MISC_FEATURE (23)..(23): X is D and E for acidic amino acids
  MISC_FEATURE (24)..(24): X is A and G
  MISC_FEATURE (25)..(25): X is N or Q for amidated amino acids
  MISC_FEATURE (26)..(26): X is D and E for acidic amino acids
  MISC_FEATURE (27)..(27): X is D and E for acidic amino acids
  MISC_FEATURE (28)..(28): X is K, R or H for basic amino acids
  MISC_FEATURE (29)..(29): X is A and G
  MISC_FEATURE (30)..(30): X is A and G
  MISC_FEATURE (31)..(31): X is I, L or V
  MISC_FEATURE (32)..(32): X is I, L or V
  MISC_FEATURE (33)..(33): X is C or S
  MISC_FEATURE (34)..(34): X is T or S
  MISC_FEATURE (35)..(35): X is A or G
  MISC_FEATURE (36)..(36): X is I, L or V
  MISC_FEATURE (37)..(37): X is I, L or V

SEQ ID NO: 299 - protein, 43 aa, Artificial
  Completely synthesized peptide construct
GIGAVLKVLTTGPALISWIKRKRQQGGGDGQEEKAGVVSTGLI

SEQ ID NO: 300 - protein, 43 aa, Artificial; identical to SEQ ID NO: 220
  peptide construct
  MISC_FEATURE (1)..(1): X is D and E for acidic amino acids
  MISC_FEATURE (2)..(2): X is I, L or V
  MISC_FEATURE (3)..(3): X is A or G
  MISC_FEATURE (4)..(4): X is A or G
  MISC_FEATURE (5)..(5): X is I, L or V
  MISC_FEATURE (6)..(6): X is I, L or V
  MISC_FEATURE (7)..(7): X is K, R or H for basic amino acids
  MISC_FEATURE (8)..(8): X is I, L or V
  MISC_FEATURE (9)..(9): X is I, L or V
  MISC_FEATURE (10)..(10): X is T or S
  MISC_FEATURE (11)..(11): X is T or S
  MISC_FEATURE (12)..(12): X is A or G
  MISC_FEATURE (13)..(13): X is F or P
  MISC_FEATURE (14)..(14): X is A or G
  MISC_FEATURE (15)..(15): X is I, L or V
  MISC_FEATURE (16)..(16): X is I, L or V
  MISC_FEATURE (17)..(17): X is C or S
  MISC_FEATURE (18)..(18): X is F, W or  Y for aromatic amino acids
  MISC_FEATURE (19)..(19): X is I, L or V
  MISC_FEATURE (20)..(20): X is K, R or H for basic amino acids
  MISC_FEATURE (21)..(21): X is K, R or H for basic amino acids
  MISC_FEATURE (22)..(22): X is K, R or H for basic amino acids
  MISC_FEATURE (23)..(23): X is K, R or H for basic amino acids
  MISC_FEATURE (24)..(24): X is N or Q for amidated amino acids
  MISC_FEATURE (25)..(25): X is N or Q for amidated amino acids
  MISC_FEATURE (26)..(26): X is A and G
  MISC_FEATURE (27)..(27): X is A or G
  MISC_FEATURE (28)..(28): X is A and G
  MISC_FEATURE (29)..(29): X is D and E for acidici amino acids
  MISC_FEATURE (30)..(30): X is A and G
  MISC_FEATURE (31)..(31): X is N or Q for amidated amino acids
  MISC_FEATURE (32)..(32): X is D and E for acidic amino acids
  MISC_FEATURE (33)..(33): X is D and E for acidic amino acids
  MISC_FEATURE (34)..(34): X is K, R or H for basic amino acids
  MISC_FEATURE (35)..(35): X is A and G
  MISC_FEATURE (36)..(36): X is A and G
  MISC_FEATURE (37)..(37): X is  I, L or V
  MISC_FEATURE (38)..(38): X is I, L or V
  MISC_FEATURE (39)..(39): X is C or S
  MISC_FEATURE (40)..(40): X is T or S
  MISC_FEATURE (41)..(41): X is A or G
  MISC_FEATURE (42)..(42): X is I, L or V
  MISC_FEATURE (43)..(43): X is I, L or V

SEQ ID NO: 301 - protein, 56 aa, Artificial
  Completely synthesized peptide construct
DLLKNGERIEKVEGGGDAEFRHDSGYEVHHQKLVFFAEDVGSNKGAIIGLMVGGVV

SEQ ID NO: 302 - protein, 56 aa, Artificial
  peptide construct
  MISC_FEATURE (1)..(1): X is D and E for acidic amino acids
  MISC_FEATURE (2)..(2): X is I, L or V
  MISC_FEATURE (3)..(3): X is I, L or V
  MISC_FEATURE (4)..(4): X is K, R or H for basic amino acids
  MISC_FEATURE (5)..(5): X is N or Q for amidated amino acids
  MISC_FEATURE (6)..(6): X is A or G
  MISC_FEATURE (7)..(7): X is D and E for acidic amino acids
  MISC_FEATURE (8)..(8): X is K, R or H for basic amino acids
  MISC_FEATURE (9)..(9): X is I, L or V
  MISC_FEATURE (10)..(10): X is D and E for acidic amino acids
  MISC_FEATURE (11)..(11): X is K, R or H for basic amino acids
  MISC_FEATURE (12)..(12): X is I, L or V
  MISC_FEATURE (13)..(13): X is D and E for acidic amino acids
  MISC_FEATURE (14)..(14): X is A or G
  MISC_FEATURE (15)..(15): X is A or G
  MISC_FEATURE (16)..(16): X is A or G
  MISC_FEATURE (17)..(17): X is D and E for acidic amino acids
  MISC_FEATURE (18)..(18): X is A or G
  MISC_FEATURE (19)..(19): X is D and E for acidic amino acids
  MISC_FEATURE (20)..(20): X is F, W or Y for aromatic amino acids
  MISC_FEATURE (21)..(21): X is K, R or H for basic amino acids
  MISC_FEATURE (22)..(22): X is K, R or H for basic amino acids
  MISC_FEATURE (23)..(23): X is D and E for acidic amino acids
  MISC_FEATURE (24)..(24): X is T or S
  MISC_FEATURE (25)..(25): X is A or G
  MISC_FEATURE (26)..(26): X is F, W or Y for aromatic amino acids
  MISC_FEATURE (27)..(27): X is D and E for acidic amino acids
  MISC_FEATURE (28)..(28): X is I, L or V
  MISC_FEATURE (29)..(29): X is K, R or H for basic amino acids
  MISC_FEATURE (30)..(30): X is K, R or H for basic amino acids
  MISC_FEATURE (31)..(31): X is N or Q for amidated amino acids
  MISC_FEATURE (32)..(32): X is K, R or H for basic amino acids
  MISC_FEATURE (33)..(33): X is I, L or V
  MISC_FEATURE (34)..(34): X is I, L or V
  MISC_FEATURE (35)..(35): X is F, W or Y for aromatic amino acids
  MISC_FEATURE (36)..(36): X is F, W or Y for aromatic amino acids
  MISC_FEATURE (37)..(37): X is A or G
  MISC_FEATURE (38)..(38): X is D and E for acidic amino acids
  MISC_FEATURE (39)..(39): X is D and E for acidic amino acids
  MISC_FEATURE (40)..(40): X is I, L or V
  MISC_FEATURE (41)..(41): X is A or G
  MISC_FEATURE (42)..(42): X is C or S
  MISC_FEATURE (43)..(43): X is N or Q for amidated amino acids
  MISC_FEATURE (44)..(44): X is K, R or H for basic amino acids
  MISC_FEATURE (45)..(45): X is A or G
  MISC_FEATURE (46)..(46): X is A or G
  MISC_FEATURE (47)..(47): X is I, L or V
  MISC_FEATURE (48)..(48): X is I, L or V
  MISC_FEATURE (49)..(49): X is A or G
  MISC_FEATURE (50)..(50): X is I, L or V
  MISC_FEATURE (51)..(51): X is M or Nle
  MISC_FEATURE (52)..(52): X is I, L or V
  MISC_FEATURE (53)..(53): X is A or G
  MISC_FEATURE (54)..(54): X is A or G
  MISC_FEATURE (55)..(55): X is I, L or V
  MISC_FEATURE (56)..(56): X is I, L or V
XXXXXXXXXXXXXXXXXXXXXXXXXXXXXXXXXXXXXXXXXXXXXXXXXXXXXXXX

SEQ ID NO: 303 - protein, 44 aa, Artificial
  Completely synthesized peptide construct
DLLKNGERIEKVEGGGDAEFRHDSGYEVHHQKLVFFAENVGSNK

SEQ ID NO: 304 - protein, 44 aa, Artificial
  peptide construct
  MISC_FEATURE (1)..(1): X is D and E for acidic amino acids
  MISC_FEATURE (2)..(2): X is I, L or V
  MISC_FEATURE (3)..(3): X is I, L or V
  MISC_FEATURE (4)..(4): X is K, R or H for basic amino acids
  MISC_FEATURE (5)..(5): X is N or Q for amidated amino acids
  MISC_FEATURE (6)..(6): X is A or G
  MISC_FEATURE (7)..(7): X is D and E for acidic amino acids
  MISC_FEATURE (8)..(8): X is K, R or H for basic amino acids
  MISC_FEATURE (9)..(9): X is I, L or V
  MISC_FEATURE (10)..(10): X is D and E for acidic amino acids
  MISC_FEATURE (11)..(11): X is K, R or H for basic amino acids
  MISC_FEATURE (12)..(12): X is I, L or V
  MISC_FEATURE (13)..(13): X is D and E for acidic amino acids
  MISC_FEATURE (14)..(14): X is A or G
  MISC_FEATURE (15)..(15): X is A or G
  MISC_FEATURE (16)..(16): X is A or G
  MISC_FEATURE (17)..(17): X is D and E for acidic amino acids
  MISC_FEATURE (18)..(18): X is A or G
  MISC_FEATURE (19)..(19): X is D and E for acidic amino acids
  MISC_FEATURE (20)..(20): X is F, W or Y for aromatic amino acids
  MISC_FEATURE (21)..(21): X is K, R or H for basic amino acids
  MISC_FEATURE (22)..(22): X is K, R or H for basic amino acids
  MISC_FEATURE (23)..(23): X is D and E for acidic amino acids
  MISC_FEATURE (24)..(24): X is T or S
  MISC_FEATURE (25)..(25): X is A or G
  MISC_FEATURE (26)..(26): X is F, W or Y for aromatic amino acids
  MISC_FEATURE (27)..(27): X is D and E for acidic amino acids
  MISC_FEATURE (28)..(28): X is I, L or V
  MISC_FEATURE (29)..(29): X is K, R or H for basic amino acids
  MISC_FEATURE (30)..(30): X is K, R or H for basic amino acids
  MISC_FEATURE (31)..(31): X is N or Q for amidated amino acids
  MISC_FEATURE (32)..(32): X is K, R or H for basic amino acids
  MISC_FEATURE (33)..(33): X is I, L or V
  MISC_FEATURE (34)..(34): X is I, L or V
  MISC_FEATURE (35)..(35): X is F, W or Y for aromatic amino acids
  MISC_FEATURE (36)..(36): X is F, W or Y for aromatic amino acids
  MISC_FEATURE (37)..(37): X is A or G
  MISC_FEATURE (38)..(38): X is D and E for acidic amino acids
  MISC_FEATURE (39)..(39): X is D and E for acidic amino acids
  MISC_FEATURE (40)..(40): X is I, L or V
  MISC_FEATURE (41)..(41): X is A or G
  MISC_FEATURE (42)..(42): X is C or S
  MISC_FEATURE (43)..(43): X is N or Q for amidated amino acids
  MISC_FEATURE (44)..(44): X is K, R or H for basic amino acids
XXXXXXXXXXXXXXXXXXXXXXXXXXXXXXXXXXXXXXXXXXXX

SEQ ID NO: 305 - protein, 45 aa, Artificial
  Completely synthesized peptide construct
DLKNGERIEKVEGGGDAEFRHDSGYEVHHQKLVFFAENVGSNKAI

SEQ ID NO: 306 - protein, 46 aa, Artificial; identical to SEQ ID NO: 144
  peptide construct
  MISC_FEATURE (1)..(1): X is D and E for acidic amino acids
  MISC_FEATURE (2)..(2): X is I, L or V
  MISC_FEATURE (3)..(3): X is I, L or V
  MISC_FEATURE (4)..(4): X is K, R or H for basic amino acids
  MISC_FEATURE (5)..(5): X is N or Q for amidated amino acids
  MISC_FEATURE (6)..(6): X is A or G
  MISC_FEATURE (7)..(7): X is D and E for acidic amino acids
  MISC_FEATURE (8)..(8): X is K, R or H for basic amino acids
  MISC_FEATURE (9)..(9): X is I, L or V
  MISC_FEATURE (10)..(10): X is D and E for acidic amino acids
  MISC_FEATURE (11)..(11): X is K, R or H for basic amino acids
  MISC_FEATURE (12)..(12): X is I, L or V
  MISC_FEATURE (13)..(13): X is D and E for acidic amino acids
  MISC_FEATURE (14)..(14): X is A or G
  MISC_FEATURE (15)..(15): X is A or G
  MISC_FEATURE (16)..(16): X is A or G
  MISC_FEATURE (17)..(17): X is D and E for acidic amino acids
  MISC_FEATURE (18)..(18): X is A or G
  MISC_FEATURE (19)..(19): X is D and E for acidic amino acids
  MISC_FEATURE (20)..(20): X is F, W or Y for aromatic amino acids
  MISC_FEATURE (21)..(21): X is K, R or H for basic amino acids
  MISC_FEATURE (22)..(22): X is K, R or H for basic amino acids
  MISC_FEATURE (23)..(23): X is D and E for acidic amino acids
  MISC_FEATURE (24)..(24): X is T or S
  MISC_FEATURE (25)..(25): X is A or G
  MISC_FEATURE (26)..(26): X is F, W or Y for aromatic amino acids
  MISC_FEATURE (27)..(27): X is D and E for acidic amino acids
  MISC_FEATURE (28)..(28): X is I, L or V
  MISC_FEATURE (29)..(29): X is K, R or H for basic amino acids
  MISC_FEATURE (30)..(30): X is K, R or H for basic amino acids
  MISC_FEATURE (31)..(31): X is N or Q for amidated amino acids
  MISC_FEATURE (32)..(32): X is K, R or H for basic amino acids
  MISC_FEATURE (33)..(33): X is I, L or V
  MISC_FEATURE (34)..(34): X is I, L or V
  MISC_FEATURE (35)..(35): X is F, W or Y for aromatic amino acids
  MISC_FEATURE (36)..(36): X is F, W or Y for aromatic amino acids
  MISC_FEATURE (37)..(37): X is A or G
  MISC_FEATURE (38)..(38): X is D and E for acidic amino acids
  MISC_FEATURE (39)..(39): X is D and E for acidic amino acids
  MISC_FEATURE (40)..(40): X is I, L or V
  MISC_FEATURE (41)..(41): X is A or G
  MISC_FEATURE (42)..(42): X is C or S
  MISC_FEATURE (43)..(43): X is N or Q for amidated amino acids
  MISC_FEATURE (44)..(44): X is K, R or H for basic amino acids
  MISC_FEATURE (45)..(45): X is A or G
  MISC_FEATURE (46)..(46): X is I, L or V

SEQ ID NO: 307 - protein, 27 aa, Artificial
  Completely synthesized peptide construct
DLLKNGERIEKVEGGGDAEFRHDSGYE

SEQ ID NO: 308 - protein, 27 aa, Artificial
  peptide construct
  MISC_FEATURE (1)..(1): X is D and E for acidic amino acids
  MISC_FEATURE (2)..(2): X is I, L or V
  MISC_FEATURE (3)..(3): X is I, L or V
  MISC_FEATURE (4)..(4): X is K, R or H for basic amino acids
  MISC_FEATURE (5)..(5): X is N or Q for amidated amino acids
  MISC_FEATURE (6)..(6): X is A or G
  MISC_FEATURE (7)..(7): X is D and E for acidic amino acids
  MISC_FEATURE (8)..(8): X is K, R or H for basic amino acids
  MISC_FEATURE (9)..(9): X is I, L or V
  MISC_FEATURE (10)..(10): X is D and E for acidic amino acids
  MISC_FEATURE (11)..(11): X is K, R or H for basic amino acids
  MISC_FEATURE (12)..(12): X is I, L or V
  MISC_FEATURE (13)..(13): X is D and E for acidic amino acids
  MISC_FEATURE (14)..(14): X is A or G
  MISC_FEATURE (15)..(15): X is A or G
  MISC_FEATURE (16)..(16): X is A or G
  MISC_FEATURE (17)..(17): X is D and E for acidic amino acids
  MISC_FEATURE (18)..(18): X is A or G
  MISC_FEATURE (19)..(19): X is D and E for acidic amino acids
  MISC_FEATURE (20)..(20): X is F, W or Y for aromatic amino acids
  MISC_FEATURE (21)..(21): X is K, R or H for basic amino acids
  MISC_FEATURE (22)..(22): X is K, R or H for basic amino acids
  MISC_FEATURE (23)..(23): X is D and E for acidic amino acids
  MISC_FEATURE (24)..(24): X is T or S
  MISC_FEATURE (25)..(25): X is A or G
  MISC_FEATURE (26)..(26): X is F, W or Y for aromatic amino acids
  MISC_FEATURE (27)..(27): X is D and E for acidic amino acids
XXXXXXXXXXXXXXXXXXXXXXXXXXX

SEQ ID NO: 309 - protein, 23 aa, Artificial
  Completely synthesized peptide construct
DLLKNGERIEKVEGGGENVGSNK

SEQ ID NO: 310 - protein, 23 aa, Artificial
  peptide construct
  MISC_FEATURE (1)..(1): X is D and E for acidic amino acids
  MISC_FEATURE (2)..(2): X is I, L or V
  MISC_FEATURE (3)..(3): X is I, L or V
  MISC_FEATURE (4)..(4): X is K, R or H for basic amino acids
  MISC_FEATURE (5)..(5): X is N or Q for amidated amino acids
  MISC_FEATURE (6)..(6): X is A or G
  MISC_FEATURE (7)..(7): X is D and E for acidic amino acids
  MISC_FEATURE (8)..(8): X is K, R or H for basic amino acids
  MISC_FEATURE (9)..(9): X is I, L or V
  MISC_FEATURE (10)..(10): X is D and E for acidic amino acids
  MISC_FEATURE (11)..(11): X is K, R or H for basic amino acids
  MISC_FEATURE (12)..(12): X is I, L or V
  MISC_FEATURE (13)..(13): X is D and E for acidic amino acids
  MISC_FEATURE (14)..(14): X is A or G
  MISC_FEATURE (15)..(15): X is A or G
  MISC_FEATURE (16)..(16): X is A or G
  MISC_FEATURE (17)..(17): X is D and E for acidic amino acids
  MISC_FEATURE (18)..(18): X is D and E for acidic amino acids
  MISC_FEATURE (19)..(19): X is I, L or V
  MISC_FEATURE (20)..(20): X is A or G
  MISC_FEATURE (21)..(21): X is C or S
  MISC_FEATURE (22)..(22): X is N or Q for amidated amino acids
  MISC_FEATURE (23)..(23): X is K, R or H for basic amino acids
XXXXXXXXXXXXXXXXXXXXXXX

SEQ ID NO: 311 - protein, 28 aa, Artificial
  Completely synthesized peptide construct
DLLKNGERIEKVEGGGDAEFRHDSGYEV

SEQ ID NO: 312 - protein, 28 aa, Artificial
  peptide construct
  MISC_FEATURE (1)..(1): X is D and E for acidic amino acids
  MISC_FEATURE (2)..(2): X is I, L or V
  MISC_FEATURE (3)..(3): X is I, L or V
  MISC_FEATURE (4)..(4): X is K, R or H for basic amino acids
  MISC_FEATURE (5)..(5): X is N or Q for amidated amino acids
  MISC_FEATURE (6)..(6): X is A or G
  MISC_FEATURE (7)..(7): X is D and E for acidic amino acids
  MISC_FEATURE (8)..(8): X is K, R or H for basic amino acids
  MISC_FEATURE (9)..(9): X is I, L or V
  MISC_FEATURE (10)..(10): X is D and E for acidic amino acids
  MISC_FEATURE (11)..(11): X is K, R or H for basic amino acids
  MISC_FEATURE (12)..(12): X is I, L or V
  MISC_FEATURE (13)..(13): X is D and E for acidic amino acids
  MISC_FEATURE (14)..(14): X is A or G
  MISC_FEATURE (15)..(15): X is A or G
  MISC_FEATURE (16)..(16): X is A or G
  MISC_FEATURE (17)..(17): X is D and E for acidic amino acids
  MISC_FEATURE (18)..(18): X is A or G
  MISC_FEATURE (19)..(19): X is D and E for acidic amino acids
  MISC_FEATURE (20)..(20): X is F, W or Y for aromatic amino acids
  MISC_FEATURE (21)..(21): X is K, R or H for basic amino acids
  MISC_FEATURE (22)..(22): X is K, R or H for basic amino acids
  MISC_FEATURE (23)..(23): X is D and E for acidic amino acids
  MISC_FEATURE (24)..(24): X is T or S
  MISC_FEATURE (25)..(25): X is A or G
  MISC_FEATURE (26)..(26): X is F, W or Y for aromatic amino acids
  MISC_FEATURE (27)..(27): X is D and E for acidic amino acids
  MISC_FEATURE (28)..(28): X is I, L or V
XXXXXXXXXXXXXXXXXXXXXXXXXXXX

SEQ ID NO: 313 - protein, 26 aa, Artificial
  Completely synthesized peptide construct
DLLKNGERIEKVEGGGDAEFRHDSGY

SEQ ID NO: 314 - protein, 26 aa, Artificial
  peptide construct
  MISC_FEATURE (1)..(1): X is D and E for acidic amino acids
  MISC_FEATURE (2)..(2): X is I, L or V
  MISC_FEATURE (3)..(3): X is I, L or V
  MISC_FEATURE (4)..(4): X is K, R or H for basic amino acids
  MISC_FEATURE (5)..(5): X is N or Q for amidated amino acids
  MISC_FEATURE (6)..(6): X is A or G
  MISC_FEATURE (7)..(7): X is D and E for acidic amino acids
  MISC_FEATURE (8)..(8): X is K, R or H for basic amino acids
  MISC_FEATURE (9)..(9): X is I, L or V
  MISC_FEATURE (10)..(10): X is D and E for acidic amino acids
  MISC_FEATURE (11)..(11): X is K, R or H for basic amino acids
  MISC_FEATURE (12)..(12): X is I, L or V
  MISC_FEATURE (13)..(13): X is D and E for acidic amino acids
  MISC_FEATURE (14)..(14): X is A or G
  MISC_FEATURE (15)..(15): X is A or G
  MISC_FEATURE (16)..(16): X is A or G
  MISC_FEATURE (17)..(17): X is D and E for acidic amino acids
  MISC_FEATURE (18)..(18): X is A or G
  MISC_FEATURE (19)..(19): X is D and Efor acidic amino acids
  MISC_FEATURE (20)..(20): X is F, W or Y for aromatic amino acids
  MISC_FEATURE (21)..(21): X is K, R or H for basic amino acids
  MISC_FEATURE (22)..(22): X is K, R or H for basic amino acids
  MISC_FEATURE (23)..(23): X is D and E for acidic amino acids
  MISC_FEATURE (24)..(24): X is T or S
  MISC_FEATURE (25)..(25): X is A or G
  MISC_FEATURE (26)..(26): X is F, W or Y for aromatic amino acids
XXXXXXXXXXXXXXXXXXXXXXXXXX

SEQ ID NO: 315 - protein, 20 aa, Artificial
  Completely synthesized peptide construct
DLLKNGERIEKVEGGGEFRH

SEQ ID NO: 316 - protein, 20 aa, Artificial
  peptide construct
  MISC_FEATURE (1)..(1): X  is D and E for acidic amino acids
  MISC_FEATURE (2)..(2): X is I, L or V
  MISC_FEATURE (3)..(3): X is I, L or V
  MISC_FEATURE (4)..(4): X is K, R or H for basic amino acids
  MISC_FEATURE (5)..(5): X is N or Q for aromatic amino acids
  MISC_FEATURE (6)..(6): X is A or G
  MISC_FEATURE (7)..(7): X is D and E for acidic amino acids
  MISC_FEATURE (8)..(8): X is K, R or H for basic amino acids
  MISC_FEATURE (9)..(9): X is I, L or V
  MISC_FEATURE (10)..(10): X is D and E for acidic amino acids
  MISC_FEATURE (11)..(11): X is K, R or H for basic amino acids
  MISC_FEATURE (12)..(12): X is I, L or V
  MISC_FEATURE (13)..(13): X is D and E for acidic amino acids
  MISC_FEATURE (14)..(14): X is A or G
  MISC_FEATURE (15)..(15): X is A or G
  MISC_FEATURE (16)..(16): X is A or G
  MISC_FEATURE (17)..(17): X is D and E for acidic amino acids
  MISC_FEATURE (18)..(18): X is F or P
  MISC_FEATURE (19)..(19): X is K, R or H for basic amino acids
  MISC_FEATURE (20)..(20): X is K, R or H for basic amino acids
XXXXXXXXXXXXXXXXXXXX

SEQ ID NO: 317 - protein, 35 aa, Artificial
  Completely synthesized peptide construct
DLLKNGERIEKVEGGGDSAFDVLSFTAEEKAGVYK

SEQ ID NO: 318 - protein, 35 aa, Artificial; identical to SEQ ID NO: 206
  peptide construct
  MISC_FEATURE (1)..(1): X is D and E for acidic amino acids
  MISC_FEATURE (2)..(2): X is I, L or V
  MISC_FEATURE (3)..(3): X is I, L or V
  MISC_FEATURE (4)..(4): X is K, R or H for basic amino acids
  MISC_FEATURE (5)..(5): X is N or Q for amidated amino acids
  MISC_FEATURE (6)..(6): X is A or G
  MISC_FEATURE (7)..(7): X is D and E for acidic amino acids
  MISC_FEATURE (8)..(8): X is K, R or H for basic amino acids
  MISC_FEATURE (9)..(9): X is I, L or V
  MISC_FEATURE (10)..(10): X is D and E for acidic amino acids
  MISC_FEATURE (11)..(11): X is K, R or H for basic amino acids
  MISC_FEATURE (12)..(12): X is I, L or V
  MISC_FEATURE (13)..(13): X is D and E for acidic amino acids
  MISC_FEATURE (14)..(14): X is A or G
  MISC_FEATURE (15)..(15): X is A or G
  MISC_FEATURE (16)..(16): X is A or G
  MISC_FEATURE (17)..(17): X is D and E for acidic amino acids
  MISC_FEATURE (18)..(18): X is C or S
  MISC_FEATURE (19)..(19): X is A or G
  MISC_FEATURE (20)..(20): X is F, W or Y for aromatic amino acids
  MISC_FEATURE (21)..(21): X is D and E for acidic amino acids
  MISC_FEATURE (22)..(22): X is I, L or V
  MISC_FEATURE (23)..(23): X is I, L or V
  MISC_FEATURE (24)..(24): X is C or S
  MISC_FEATURE (25)..(25): X is F, W or Y for aromatic amino acids
  MISC_FEATURE (26)..(26): X is T or S
  MISC_FEATURE (27)..(27): X is A or G
  MISC_FEATURE (28)..(28): X is D and E for acidic amino acids
  MISC_FEATURE (29)..(29): X is D and E for acidic amino acids
  MISC_FEATURE (30)..(30): X is K, R or H for basic amino acids
  MISC_FEATURE (31)..(31): X is A or G
  MISC_FEATURE (32)..(32): X is A or G
  MISC_FEATURE (33)..(33): X is I, L or V
  MISC_FEATURE (34)..(34): X is F, W or  Y for aromatic amino acids
  MISC_FEATURE (35)..(35): X is K, R or H for basic amino acids

SEQ ID NO: 319 - protein, 30 aa, Artificial
  Completely synthesized peptide construct
DLLKNGERIEKVEGGGSLKLMATLFSTYAS

SEQ ID NO: 320 - protein, 30 aa, Artificial; identical to SEQ ID NO: 58
  peptide construct
  MISC_FEATURE (1)..(1): X is D and E for acidic amino acids
  MISC_FEATURE (2)..(2): X is I, L or V
  MISC_FEATURE (3)..(3): X is I, L or V
  MISC_FEATURE (4)..(4): X is K, R or H for basic amino acids
  MISC_FEATURE (5)..(5): X is N or Q for amidated amino acids
  MISC_FEATURE (6)..(6): X is A or G
  MISC_FEATURE (7)..(7): X is D and E for acidic amino acids
  MISC_FEATURE (8)..(8): X is K, R or H for basic amino acids
  MISC_FEATURE (9)..(9): X is I, L or V
  MISC_FEATURE (10)..(10): X is D and E for acidic amino acids
  MISC_FEATURE (11)..(11): X is K, R or H for basic amino acids
  MISC_FEATURE (12)..(12): X is I, L or V
  MISC_FEATURE (13)..(13): X is D and E for acidic amino acids
  MISC_FEATURE (14)..(14): X is A or G
  MISC_FEATURE (15)..(15): X is A or G
  MISC_FEATURE (16)..(16): X is A or G
  MISC_FEATURE (17)..(17): X is C or S
  MISC_FEATURE (18)..(18): X is I, L or V
  MISC_FEATURE (19)..(19): X is K, R or H for basic amino acids
  MISC_FEATURE (20)..(20): X is I, L or V
  MISC_FEATURE (21)..(21): X is M  or Nle
  MISC_FEATURE (22)..(22): X is A or G
  MISC_FEATURE (23)..(23): X is  T or S
  MISC_FEATURE (24)..(24): X is I, L or V
  MISC_FEATURE (25)..(25): X is F or P
  MISC_FEATURE (26)..(26): X is C or S
  MISC_FEATURE (27)..(27): X is T or S
  MISC_FEATURE (28)..(28): X is F, W or Y for aromatic amino acids
  MISC_FEATURE (29)..(29): X is A or G
  MISC_FEATURE (30)..(30): X is C or S

SEQ ID NO: 321 - protein, 30 aa, Artificial
  Completely synthesized peptide construct
DLLKNGERIEKVEGGGSLKLMATLFSSYAT

SEQ ID NO: 322 - protein, 30 aa, Artificial; identical to SEQ ID NO: 58
  peptide construct
  MISC_FEATURE (1)..(1): X is D and E for acidic amino acids
  MISC_FEATURE (2)..(2): X is I, L or V
  MISC_FEATURE (3)..(3): X is I, L or V
  MISC_FEATURE (4)..(4): X is K, R or H for basic amino acids
  MISC_FEATURE (5)..(5): X is N or Q for amidated amino acids
  MISC_FEATURE (6)..(6): X is A or G
  MISC_FEATURE (7)..(7): X is D and E for acidic amino acids
  MISC_FEATURE (8)..(8): X is K, R or H for basic amino acids
  MISC_FEATURE (9)..(9): X is I, L or V
  MISC_FEATURE (10)..(10): X is D and E for acidic amino acids
  MISC_FEATURE (11)..(11): X is K, R or H for basic amino acids
  MISC_FEATURE (12)..(12): X is I, L or V
  MISC_FEATURE (13)..(13): X is D and E for acidic amino acids
  MISC_FEATURE (14)..(14): X is A or G
  MISC_FEATURE (15)..(15): X is A or G
  MISC_FEATURE (16)..(16): X is A or G
  MISC_FEATURE (17)..(17): X is C or S
  MISC_FEATURE (18)..(18): X is I, L or V
  MISC_FEATURE (19)..(19): X is K, R or H for basic amino acids
  MISC_FEATURE (20)..(20): X is I, L or V
  MISC_FEATURE (21)..(21): X is M or Nle
  MISC_FEATURE (22)..(22): X is A or G
  MISC_FEATURE (23)..(23): X is Tor S
  MISC_FEATURE (24)..(24): X is I, L or V
  MISC_FEATURE (25)..(25): X is F or P
  MISC_FEATURE (26)..(26): X is C or S
  MISC_FEATURE (27)..(27): X is C or S
  MISC_FEATURE (28)..(28): X is F, W or Y for aromatic amino acids
  MISC_FEATURE (29)..(29): X is A or G
  MISC_FEATURE (30)..(30): X is T or S

SEQ ID NO: 323 - protein, 27 aa, Artificial
  Completely synthesized peptide construct
DLKKNGERIEKVEGGGNITEIADLTQK

SEQ ID NO: 324 - protein, 27 aa, Artificial
  peptide construct
  MISC_FEATURE (1)..(1): X is D and E for acidic amino acids
  MISC_FEATURE (2)..(2): X is I, L or V
  MISC_FEATURE (3)..(3): X is I, L or V
  MISC_FEATURE (4)..(4): X is K, R or H for basic amino acids
  MISC_FEATURE (5)..(5): X is N or Q for amidated amino acids
  MISC_FEATURE (6)..(6): X is A or G
  MISC_FEATURE (7)..(7): X is D and E for acidic amino acids
  MISC_FEATURE (8)..(8): X is K, R or H for basic amino acids
  MISC_FEATURE (9)..(9): X is I, L or V
  MISC_FEATURE (10)..(10): X is D and E for acidic amino acids
  MISC_FEATURE (11)..(11): X is K,  R or H for basic amino acids
  MISC_FEATURE (12)..(12): X is I, L or V
  MISC_FEATURE (13)..(13): X is D and E for acidic amino acids
  MISC_FEATURE (14)..(14): X is A or G
  MISC_FEATURE (15)..(15): X is A or G
  MISC_FEATURE (16)..(16): X is A or G
  MISC_FEATURE (17)..(17): X is N or Q for amidated amino acids
  MISC_FEATURE (18)..(18): X is I, L or V
  MISC_FEATURE (19)..(19): X is T or S
  MISC_FEATURE (20)..(20): X is D and E for acidic amino acids
  MISC_FEATURE (21)..(21): X is I, L or V
  MISC_FEATURE (22)..(22): X is A or G
  MISC_FEATURE (23)..(23): X is D and E for acidic amino acids
  MISC_FEATURE (24)..(24): X is I, L or V
  MISC_FEATURE (25)..(25): X is T or S
  MISC_FEATURE (26)..(26): X is N or Q for amidated amino acids
  MISC_FEATURE (27)..(27): X is K, R or H for basic amino acids
XXXXXXXXXXXXXXXXXXXXXXXXXXX

SEQ ID NO: 325 - protein, 56 aa, Artificial
  Completely synthesized peptide construct
DLLKNGERIEKVEGGGNMYAMMIARFKMFPEVKEKGMAALPRLIAFTSEHSHFSLK

SEQ ID NO: 326 - protein, 56 aa, Artificial; identical to SEQ ID NO: 302
  peptide construct
  MISC_FEATURE (1)..(1): X is D and E for acidic amino acids
  MISC_FEATURE (2)..(2): X is I, L or V
  MISC_FEATURE (3)..(3): X is I, L or V
  MISC_FEATURE (4)..(4): X is K, R or H for basic amino acids
  MISC_FEATURE (5)..(5): X is N or Q for amidated amino acids
  MISC_FEATURE (6)..(6): X is A or G
  MISC_FEATURE (7)..(7): X is D and E for acidic amino acids
  MISC_FEATURE (8)..(8): X is K, R or H for basic amino acids
  MISC_FEATURE (9)..(9): X is I, L or V
  MISC_FEATURE (10)..(10): X is D and E for acidic amino acids
  MISC_FEATURE (11)..(11): X is K, R or H for basic amino acids
  MISC_FEATURE (12)..(12): X is I, L or V
  MISC_FEATURE (13)..(13): X is D and E for acidic amino acids
  MISC_FEATURE (14)..(14): X is A or G
  MISC_FEATURE (15)..(15): X is A or G
  MISC_FEATURE (16)..(16): X is A or G
  MISC_FEATURE (17)..(17): X is N or Q for amidated amino acids
  MISC_FEATURE (18)..(18): X is M or Nle
  MISC_FEATURE (19)..(19): X is F, W or Y for aromatic amino acids
  MISC_FEATURE (20)..(20): X is A or G
  MISC_FEATURE (21)..(21): X is M or Nle
  MISC_FEATURE (22)..(22): X is M or Nle
  MISC_FEATURE (23)..(23): X is I, L or V
  MISC_FEATURE (24)..(24): X is A or G
  MISC_FEATURE (25)..(25): X is K, R or H for basic amino acids
  MISC_FEATURE (26)..(26): X is F, W or Y for aromatic amino acids
  MISC_FEATURE (27)..(27): X is K, R or H for basic amino acids
  MISC_FEATURE (28)..(28): X is M or Nle
  MISC_FEATURE (29)..(29): X is F, W or Y for aromatic amino acids
  MISC_FEATURE (30)..(30): X is F or P
  MISC_FEATURE (31)..(31): X is D and E for acidic amino acids
  MISC_FEATURE (32)..(32): X is I, L or V
  MISC_FEATURE (33)..(33): X is K, R or H for basic amino acids
  MISC_FEATURE (34)..(34): X is D and E for acidic amino acids
  MISC_FEATURE (35)..(35): X is K, R or H for basic amino acids
  MISC_FEATURE (36)..(36): X is A or G
  MISC_FEATURE (37)..(37): X is M or Nle
  MISC_FEATURE (38)..(38): X is A or G
  MISC_FEATURE (39)..(39): X is A or G
  MISC_FEATURE (40)..(40): X is I, L or V
  MISC_FEATURE (41)..(41): X is F or P
  MISC_FEATURE (42)..(42): X is K, R or H for basic amino acids
  MISC_FEATURE (43)..(43): X is I, L or V
  MISC_FEATURE (44)..(44): X is I, L or V
  MISC_FEATURE (45)..(45): X is A or G
  MISC_FEATURE (46)..(46): X is F, W or Y for aromatic amino acids
  MISC_FEATURE (47)..(47): X is T or S
  MISC_FEATURE (48)..(48): X is C or S
  MISC_FEATURE (49)..(49): X is D and E for acidic amino acids
  MISC_FEATURE (50)..(50): X is K, R or H for basic amino acids
  MISC_FEATURE (51)..(51): X is C or S
  MISC_FEATURE (52)..(52): X is K, R or H for basic amino acids
  MISC_FEATURE (53)..(53): X is F, W or Y for aromatic amino acids
  MISC_FEATURE (54)..(54): X is C or S
  MISC_FEATURE (55)..(55): X is I, L or V
  MISC_FEATURE (56)..(56): X is K, R or H for basic amino acids

SEQ ID NO: 327 - protein, 50 aa, Artificial [sequence omitted]

SEQ ID NO: 328 - protein, 50 aa, Artificial
  peptide construct
  MISC_FEATURE (1)..(1): X is D and E for acidic amino acids
  MISC_FEATURE (2)..(2): X is I, L or V
  MISC_FEATURE (3)..(3): X is I, L or V
  MISC_FEATURE (4)..(4): X is K, R or H for basic amino acids
  MISC_FEATURE (5)..(5): X is N or Q for amidated amino acids
  MISC_FEATURE (6)..(6): X is A or G
  MISC_FEATURE (7)..(7): X is D and E for acidic amino acids
  MISC_FEATURE (8)..(8): X is K, R or H for basic amino acids
  MISC_FEATURE (9)..(9): X is I, L or V
  MISC_FEATURE (10)..(10): X is D and E for acidic amino acids
  MISC_FEATURE (11)..(11): X is K, R or H for basic amino acids
  MISC_FEATURE (12)..(12): X is I, L or V
  MISC_FEATURE (13)..(13): X is D and E for acidic amino acids
  MISC_FEATURE (14)..(14): X is A or G
  MISC_FEATURE (15)..(15): X is A or G
  MISC_FEATURE (16)..(16): X is A or G
  MISC_FEATURE (17)..(17): X is I, L or V
  MISC_FEATURE (18)..(18): X is A or G
  MISC_FEATURE (19)..(19): X is K, R or H for basic amino acids
  MISC_FEATURE (20)..(20): X is F, W or Y for aromatic amino acids
  MISC_FEATURE (21)..(21): X is K, R or H for basic amino acids
  MISC_FEATURE (22)..(22): X is M or Nle
  MISC_FEATURE (23)..(23): X is F, W or Y for aromatic amino acid
  MISC_FEATURE (24)..(24): X is F or P
  MISC_FEATURE (25)..(25): X is D and E for acidic amino acids
  MISC_FEATURE (26)..(26): X is I, L or V
  MISC_FEATURE (27)..(27): X is K, R or H for basic amino acids
  MISC_FEATURE (28)..(28): X is D and E for acidic amino acids
  MISC_FEATURE (29)..(29): X is K, R or H for basic amino acids
  MISC_FEATURE (30)..(30): X is A or G
  MISC_FEATURE (31)..(31): X is M or Nle
  MISC_FEATURE (32)..(32): X is A or G
  MISC_FEATURE (33)..(33): X is A or G
  MISC_FEATURE (34)..(34): X is I, L or V
  MISC_FEATURE (35)..(35): X is F or P
  MISC_FEATURE (36)..(36): X is K, R or H for basic amino acids
  MISC_FEATURE (37)..(37): X is I, L or V
  MISC_FEATURE (38)..(38): X is I, L or V
  MISC_FEATURE (39)..(39): X is A or G
  MISC_FEATURE (40)..(40): X is F, W or Y for aromatic amino acids
  MISC_FEATURE (41)..(41): X is T or S
  MISC_FEATURE (42)..(42): X is C or S
  MISC_FEATURE (43)..(43): X is D and E for acidic amino acids
  MISC_FEATURE (44)..(44): X is K, R or H for basic amino acids
  MISC_FEATURE (45)..(45): X is C or S
  MISC_FEATURE (46)..(46): X is K, R or H for basic amino acids
  MISC_FEATURE (47)..(47): X is F, W or Y for aromatic amino acids
  MISC_FEATURE (48)..(48): X is C or S
  MISC_FEATURE (49)..(49): X is I, L or V
  MISC_FEATURE (50)..(50): X is K, R or H for basic amino acids
XXXXXXXXXXXXXXXXXXXXXXXXXXXXXXXXXXXXXXXXXXXXXXXXXX

SEQ ID NO: 329 - protein, 36 aa, Artificial
  Completely synthesized peptide construct
DLLKNGERIEKVEGGGSRLSKVAPVIKARMMEYGTT

SEQ ID NO: 330 - protein, 36 aa, Artificial; identical to SEQ ID NO: 172
  peptide construct
  MISC_FEATURE (1)..(1): X is D and E for acidic amino acids
  MISC_FEATURE (2)..(2): X is I, L or V
  MISC_FEATURE (3)..(3): X is I, L or V
  MISC_FEATURE (4)..(4): X is K, R or H for basic amino acids
  MISC_FEATURE (5)..(5): X is N or Q for amidated amino acids
  MISC_FEATURE (6)..(6): X is A or G
  MISC_FEATURE (7)..(7): X is D and E for acid amino acids
  MISC_FEATURE (8)..(8): X is K, R or H for basic amino acids
  MISC_FEATURE (9)..(9): X is I, L or V
  MISC_FEATURE (10)..(10): X is D and E for acidic amino acids
  MISC_FEATURE (11)..(11): X is K, R or H for basic amino acids
  MISC_FEATURE (12)..(12): X is I, L or V
  MISC_FEATURE (13)..(13): X is D and E for acidic amino acids
  MISC_FEATURE (14)..(14): X is A or G
  MISC_FEATURE (15)..(15): X is A or G
  MISC_FEATURE (16)..(16): X is A or G
  MISC_FEATURE (17)..(17): X is C or S
  MISC_FEATURE (18)..(18): X is K, R or H for basic amino acids
  MISC_FEATURE (19)..(19): X is I, L or V
  MISC_FEATURE (20)..(20): X is C or S
  MISC_FEATURE (21)..(21): X is K, R or H for basic amino acids
  MISC_FEATURE (22)..(22): X is I, L or V
  MISC_FEATURE (23)..(23): X is A or G
  MISC_FEATURE (24)..(24): X is F or P
  MISC_FEATURE (25)..(25): X is I, L or V
  MISC_FEATURE (26)..(26): X is I, L or V
  MISC_FEATURE (27)..(27): X is K, R or H for basic amino acids
  MISC_FEATURE (28)..(28): X is A or G
  MISC_FEATURE (29)..(29): X is K, R or H for basic amino acids
  MISC_FEATURE (30)..(30): X is M or Nle
  MISC_FEATURE (31)..(31): X is M or Nle
  MISC_FEATURE (32)..(32): X is D and E for acidic amino acids
  MISC_FEATURE (33)..(33): X is F, W or Y for aromatic amino acids
  MISC_FEATURE (34)..(34): X is A or G
  MISC_FEATURE (35)..(35): X is T or S
  MISC_FEATURE (36)..(36): X is T or S

SEQ ID NO: 331 - protein, 35 aa, Artificial
  Completely synthesized peptide construct
DLKKNGERIEKVEGGGIPPSLRYLEDEERMSRLSK

SEQ ID NO: 332 - protein, 34 aa, Artificial; identical to SEQ ID NO: 79
  peptide construct
  MISC_FEATURE (1)..(1): X is D and E for acidic amino acids
  MISC_FEATURE (2)..(2): X is I, L or V
  MISC_FEATURE (3)..(3): X is I, L or V
  MISC_FEATURE (4)..(4): X is K, R or H for basic amino acids
  MISC_FEATURE (5)..(5): X is N or Q for amidated amino acids
  MISC_FEATURE (6)..(6): X is A or G
  MISC_FEATURE (7)..(7): X is D and E for acidic amino acids
  MISC_FEATURE (8)..(8): X is K, R or H for basic amino acids
  MISC_FEATURE (9)..(9): X is I, L or V
  MISC_FEATURE (10)..(10): X is D and E for acidic amino acids
  MISC_FEATURE (11)..(11): X is K, R or H for basic amino acids
  MISC_FEATURE (12)..(12): X is I, L or V
  MISC_FEATURE (13)..(13): X is D and E for acidic amino acids
  MISC_FEATURE (14)..(14): X is A or G
  MISC_FEATURE (15)..(15): X is A or G
  MISC_FEATURE (16)..(16): X is A or G
  MISC_FEATURE (17)..(17): X is I, L or V
  MISC_FEATURE (18)..(18): X is F or P
  MISC_FEATURE (19)..(19): X is F or P
  MISC_FEATURE (20)..(20): X is C or S
  MISC_FEATURE (21)..(21): X is I, L or V
  MISC_FEATURE (22)..(22): X is K, R or H for basic amino acids
  MISC_FEATURE (23)..(23): X is F, W or Y for aromatic amino acids
  MISC_FEATURE (24)..(24): X is D and E for acidic amino acids
  MISC_FEATURE (25)..(25): X is D and E for acidic amino acids
  MISC_FEATURE (26)..(26): X is D and E for acidic amino acids
  MISC_FEATURE (27)..(27): X is D and E for acidic amino acids
  MISC_FEATURE (28)..(28): X is K, R or H for basic amino acids
  MISC_FEATURE (29)..(29): X is M or Nle
  MISC_FEATURE (30)..(30): X is C or S
  MISC_FEATURE (31)..(31): X is K, R or H for basic amino acids
  MISC_FEATURE (32)..(32): X is I, L or V
  MISC_FEATURE (33)..(33): X is C or S
  MISC_FEATURE (34)..(34): X is K, R or H for basic amino acids

SEQ ID NO: 333 - protein, 35 aa, Artificial
  Completely synthesized peptide construct
DLKNGERIEKVEGGGNTNMFTYEIAPVFVLLEYVT

SEQ ID NO: 334 - protein, 36 aa, Artificial; identical to SEQ ID NO: 172
  peptide construct
  MISC_FEATURE (1)..(1): X is D and E for acidic amino acids
  MISC_FEATURE (2)..(2): X is I, L or V
  MISC_FEATURE (3)..(3): X is I, L or V
  MISC_FEATURE (4)..(4): X is K, R or H for basic amino acids
  MISC_FEATURE (5)..(5): X is N or Q for amidated amino acids
  MISC_FEATURE (6)..(6): X is A or G
  MISC_FEATURE (7)..(7): X is D and E for acidic amino acids
  MISC_FEATURE (8)..(8): X is K,  R or H for basic amino acids
  MISC_FEATURE (9)..(9): X is I, L or V
  MISC_FEATURE (10)..(10): X is D and E for acidic amino acids
  MISC_FEATURE (11)..(11): X is K, R or H for basic amino acids
  MISC_FEATURE (12)..(12): X is I, L or V
  MISC_FEATURE (13)..(13): X is D and E for acidic amino acids
  MISC_FEATURE (14)..(14): X is A or G
  MISC_FEATURE (15)..(15): X is A or G
  MISC_FEATURE (16)..(16): X is A or G
  MISC_FEATURE (17)..(17): X is N or Q for amidated amino acids
  MISC_FEATURE (18)..(18): X is T or S
  MISC_FEATURE (19)..(19): X is N or Q for amidated amino acids
  MISC_FEATURE (20)..(20): X is M or Nle
  MISC_FEATURE (21)..(21): X is F, W or Y for aromatic amino acids
  MISC_FEATURE (22)..(22): X is T or S
  MISC_FEATURE (23)..(23): X is F, W or Y for aromatic amino acids
  MISC_FEATURE (24)..(24): X is D and E for acidic amino acids
  MISC_FEATURE (25)..(25): X is I, L or V
  MISC_FEATURE (26)..(26): X is A or G
  MISC_FEATURE (27)..(27): X is F or P
  MISC_FEATURE (28)..(28): X is I, L or V
  MISC_FEATURE (29)..(29): X is F, W or Y for aromatic amino acids
  MISC_FEATURE (30)..(30): X is I, L or V
  MISC_FEATURE (31)..(31): X is I, L or V
  MISC_FEATURE (32)..(32): X is I, L or V
  MISC_FEATURE (33)..(33): X is D and E for acidic amino acids
  MISC_FEATURE (34)..(34): X is F, W or Y for aromatic amino acids
  MISC_FEATURE (35)..(35): X is I, L or V
  MISC_FEATURE (36)..(36): X is T or S

SEQ ID NO: 335 - protein, 31 aa, Artificial
  Completely synthesized peptide construct
DLLKNGERIEKVEGGGFKADEKKFWGKYLYE

SEQ ID NO: 336 - protein, 31 aa, Artificial; identical to SEQ ID NO: 130
  peptide construct
  MISC_FEATURE (1)..(1): X is D and E for acidic amino acids
  MISC_FEATURE (2)..(2): X is I, L or V
  MISC_FEATURE (3)..(3): X is I, L or V
  MISC_FEATURE (4)..(4): X is K, R or H for basic amino acids
  MISC_FEATURE (5)..(5): X is N or Q for amidated amino acids
  MISC_FEATURE (6)..(6): X is A or G
  MISC_FEATURE (7)..(7): X is D and E for acidic amino acids
  MISC_FEATURE (8)..(8): X is K, R or H for basic amino acids
  MISC_FEATURE (9)..(9): X is I, L or V
  MISC_FEATURE (10)..(10): X is D and E for acidic amino acids
  MISC_FEATURE (11)..(11): X is K, R or H for basic amino acids
  MISC_FEATURE (12)..(12): X is I, L or V
  MISC_FEATURE (13)..(13): X is D and E for acidic amino acids
  MISC_FEATURE (14)..(14): X is A or G
  MISC_FEATURE (15)..(15): X is A or G
  MISC_FEATURE (16)..(16): X is A or G
  MISC_FEATURE (17)..(17): X is F, Wor Y for aromatic amino acids
  MISC_FEATURE (18)..(18): X is K, R or H for basic amino acids
  MISC_FEATURE (19)..(19): X is A or G
  MISC_FEATURE (20)..(20): X is D and E for acidic amino acids
  MISC_FEATURE (21)..(21): X is D and E for acidic amino acids
  MISC_FEATURE (22)..(22): X is K, R or  H for basic amino acids
  MISC_FEATURE (23)..(23): X is K, R or H for basic amino acids
  MISC_FEATURE (24)..(24): X is F, W or Y for aromatic amino acids
  MISC_FEATURE (25)..(25): X is F,  W or Y for aromatic amino acids
  MISC_FEATURE (26)..(26): X is A or G
  MISC_FEATURE (27)..(27): X is K, R or H for basic amino acids
  MISC_FEATURE (28)..(28): X is F,  W or Y for aromatic amino acids
  MISC_FEATURE (29)..(29): X is I, L or V
  MISC_FEATURE (30)..(30): X is F, W or Y for aromatic amino acids
  MISC_FEATURE (31)..(31): X is D and E for acidic amino acids

SEQ ID NO: 337 - protein, 31 aa, Artificial
  Completely synthesized peptide construct
DLKKNGERIEKVEGGGSHLVEALYLVCGERG

SEQ ID NO: 338 - protein, 30 aa, Artificial; identical to SEQ ID NO: 58
  peptide construct
  MISC_FEATURE (1)..(1): X is D and E for acidic amino acids
  MISC_FEATURE (2)..(2): X is I, L or V
  MISC_FEATURE (3)..(3): X is I, L or V
  MISC_FEATURE (4)..(4): X is K, R or H for basic amino acids
  MISC_FEATURE (5)..(5): X is N or Q for amidated amino acids
  MISC_FEATURE (6)..(6): X is A or G
  MISC_FEATURE (7)..(7): X is D and E for acidic amino acids
  MISC_FEATURE (8)..(8): X is K,  R or H for basic amino acids
  MISC_FEATURE (9)..(9): X is I, L or V
  MISC_FEATURE (10)..(10): X is D and E for acidic amino acids
  MISC_FEATURE (11)..(11): X is K, R or H for basic amino acids
  MISC_FEATURE (12)..(12): X is I, L or V
  MISC_FEATURE (13)..(13): X is D and E for acidic amino acids
  MISC_FEATURE (14)..(14): X is A or G
  MISC_FEATURE (15)..(15): X is A or G
  MISC_FEATURE (16)..(16): X is A or G
  MISC_FEATURE (17)..(17): X is C or S
  MISC_FEATURE (18)..(18): X is K, R or H for basic amino acids
  MISC_FEATURE (19)..(19): X is I, L or V
  MISC_FEATURE (20)..(20): X is I, L or V
  MISC_FEATURE (21)..(21): X is D and E for acidic amino acids
  MISC_FEATURE (22)..(22): X is A or G
  MISC_FEATURE (23)..(23): X is I, L or V
  MISC_FEATURE (24)..(24): X is F, W or Y for aromatic amino acids
  MISC_FEATURE (25)..(25): X is I, L or V
  MISC_FEATURE (26)..(26): X is C or S
  MISC_FEATURE (27)..(27): X is A or G
  MISC_FEATURE (28)..(28): X is D and E for acidic amino acids
  MISC_FEATURE (29)..(29): X is K, R or H for basic amino acids
  MISC_FEATURE (30)..(30): X is A or G

SEQ ID NO: 339 - protein, 39 aa, Artificial
  Completely synthesized peptide construct
DLKNGERIEKVEGGGVLGGGCALLRCIPALDSLTPANED

SEQ ID NO: 340 - protein, 40 aa, Artificial; identical to SEQ ID NO: 54
  peptide construct
  MISC_FEATURE (1)..(1): X is D and E for acidic amino acids
  MISC_FEATURE (2)..(2): X is I, L or V
  MISC_FEATURE (3)..(3): X is I, L or V
  MISC_FEATURE (4)..(4): X is K, R or H for basic amino acids
  MISC_FEATURE (5)..(5): X is N or Q for amidated amino acids
  MISC_FEATURE (6)..(6): X is A or G
  MISC_FEATURE (7)..(7): X is D and E for acidic amino acids
  MISC_FEATURE (8)..(8): X is K, R or H for basic amino acids
  MISC_FEATURE (9)..(9): X is I, L or V
  MISC_FEATURE (10)..(10): X is D and E for acidic amino acids
  MISC_FEATURE (11)..(11): X is K, R or H for basic amino acids
  MISC_FEATURE (12)..(12): X is I, L or V
  MISC_FEATURE (13)..(13): X is D and E for acidic amino acids
  MISC_FEATURE (14)..(14): X is A or G
  MISC_FEATURE (15)..(15): X is A or G
  MISC_FEATURE (16)..(16): X is A or G
  MISC_FEATURE (17)..(17): X is I, L or V
  MISC_FEATURE (18)..(18): X is I, L or V
  MISC_FEATURE (19)..(19): X is A or G
  MISC_FEATURE (20)..(20): X is A or G
  MISC_FEATURE (21)..(21): X is A or G
  MISC_FEATURE (22)..(22): X is C or S
  MISC_FEATURE (23)..(23): X is A or G
  MISC_FEATURE (24)..(24): X is I, L or V
  MISC_FEATURE (25)..(25): X is I, L or V
  MISC_FEATURE (26)..(26): X is K, R or H for basic amino acids
  MISC_FEATURE (27)..(27): X is C or S
  MISC_FEATURE (28)..(28): X is I, L or V
  MISC_FEATURE (29)..(29): X is  F or P
  MISC_FEATURE (30)..(30): X is A or G
  MISC_FEATURE (31)..(31): X is I, L or V
  MISC_FEATURE (32)..(32): X is D and E for acidic amino acids
  MISC_FEATURE (33)..(33): X is C or S
  MISC_FEATURE (34)..(34): X is I, L or V
  MISC_FEATURE (35)..(35): X is T or S
  MISC_FEATURE (36)..(36): X is F or P
  MISC_FEATURE (37)..(37): X is A or G
  MISC_FEATURE (38)..(38): X is N or Q for amidated amino acids
  MISC_FEATURE (39)..(39): X is D and E for acidic amino acids
  MISC_FEATURE (40)..(40): X is D and E for acidic amino acids

SEQ ID NO: 341 - protein, 44 aa, Artificial
  Completely synthesized peptide construct
DLLKNGERIEKVEGGGEACVTSWLWSGEGAVFYRVDLHFINLGT

SEQ ID NO: 342 - protein, 44 aa, Artificial; identical to SEQ ID NO: 304
  peptide construct
  MISC_FEATURE (1)..(1): X is D and E for acidic amino acids
  MISC_FEATURE (2)..(2): X is I, L or V
  MISC_FEATURE (3)..(3): X is I, L or V
  MISC_FEATURE (4)..(4): X is F, W or Y for aromatic amino acids
  MISC_FEATURE (5)..(5): X is N or Q for amidated amino acids
  MISC_FEATURE (6)..(6): X is A or G
  MISC_FEATURE (7)..(7): X is D and E for acidic amino acids
  MISC_FEATURE (8)..(8): X is K, R or H for basic amino acids
  MISC_FEATURE (9)..(9): X is I, L or V
  MISC_FEATURE (10)..(10): X is D and E for acidic amino acids
  MISC_FEATURE (11)..(11): X is K, R or H for basic amino acids
  MISC_FEATURE (12)..(12): X is I, L or V
  MISC_FEATURE (13)..(13): X is D and E for acidic amino acids
  MISC_FEATURE (14)..(14): X is A or G
  MISC_FEATURE (15)..(15): X is A or G
  MISC_FEATURE (16)..(16): X is A or G
  MISC_FEATURE (17)..(17): X is D and E for acidic amino acids
  MISC_FEATURE (18)..(18): X is A or G
  MISC_FEATURE (19)..(19): X is C or S
  MISC_FEATURE (20)..(20): X is I, L or V
  MISC_FEATURE (21)..(21): X is T or S
  MISC_FEATURE (22)..(22): X is C or S
  MISC_FEATURE (23)..(23): X is F, W or Y for aromatic amino acids
  MISC_FEATURE (24)..(24): X is I, L or V
  MISC_FEATURE (25)..(25): X is F, W or Y for aromatic amino acids
  MISC_FEATURE (26)..(26): X is C or S
  MISC_FEATURE (27)..(27): X is A or G
  MISC_FEATURE (28)..(28): X is D and E for acidic amino acids
  MISC_FEATURE (29)..(29): X is A or G
  MISC_FEATURE (30)..(30): X is A or G
  MISC_FEATURE (31)..(31): X is I, L or V
  MISC_FEATURE (32)..(32): X is F, W or Y for aromatic amino acids
  MISC_FEATURE (33)..(33): X is F, W or Y for aromatic amino acids
  MISC_FEATURE (34)..(34): X is K, R or H for basic amino acids
  MISC_FEATURE (35)..(35): X is I, L or V
  MISC_FEATURE (36)..(36): X is D and  E for acidic amino acids
  MISC_FEATURE (37)..(37): X is I, L or V
  MISC_FEATURE (38)..(38): X is K, R or H for basic amino acids
  MISC_FEATURE (39)..(39): X is F, W or Y for aromatic amino acids
  MISC_FEATURE (40)..(40): X is I, L or V
  MISC_FEATURE (41)..(41): X is N or Q for amidated amino acids
  MISC_FEATURE (42)..(42): X is I, L or V
  MISC_FEATURE (43)..(43): X is A or G
  MISC_FEATURE (44)..(44): X is T or S

SEQ ID NO: 343 - protein, 36 aa, Artificial
  Completely synthesized peptide construct
DLKNGERIEKVEGGGMDFWCVEHDRPPPATPTSLTT

SEQ ID NO: 344 - protein, 37 aa, Artificial; identical to SEQ ID NO: 158
  peptide construct
  MISC_FEATURE (1)..(1): X is D and E for acidic amino acids
  MISC_FEATURE (2)..(2): X is I, L or V
  MISC_FEATURE (3)..(3): X is I, L or V
  MISC_FEATURE (4)..(4): X is K,  R or H for basic amino acids
  MISC_FEATURE (5)..(5): X is N or Q for amidated amino acids
  MISC_FEATURE (6)..(6): X is A or G
  MISC_FEATURE (7)..(7): X is D and E for acidic amino acids
  MISC_FEATURE (8)..(8): X is K, R or H for basic amino acids
  MISC_FEATURE (9)..(9): X is I, L or V
  MISC_FEATURE (10)..(10): X is D and E for acidic amino acids
  MISC_FEATURE (11)..(11): X is K, R or H for basic amino acids
  MISC_FEATURE (12)..(12): X is I, L or V
  MISC_FEATURE (13)..(13): X is D and E for acidic amino acids
  MISC_FEATURE (14)..(14): X is A or G
  MISC_FEATURE (15)..(15): X is A or G
  MISC_FEATURE (16)..(16): X is A or G
  MISC_FEATURE (17)..(17): X is M or Nle
  MISC_FEATURE (18)..(18): X is D and E for acidic amino acids
  MISC_FEATURE (19)..(19): X is F, W or Y for aromatic amino acids
  MISC_FEATURE (20)..(20): X is F, W or Y for aromatic amino acids
  MISC_FEATURE (21)..(21): X is C or S
  MISC_FEATURE (22)..(22): X is I, L or V
  MISC_FEATURE (23)..(23): X is D and E for acidic amino acids
  MISC_FEATURE (24)..(24): X is K, R or H for basic amino acids
  MISC_FEATURE (25)..(25): X is D and E for acidic amino acids
  MISC_FEATURE (26)..(26): X is K, R or H for basic amino acids
  MISC_FEATURE (27)..(27): X is F or P
  MISC_FEATURE (28)..(28): X is F or P
  MISC_FEATURE (29)..(29): X is F or P
  MISC_FEATURE (30)..(30): X is A or G
  MISC_FEATURE (31)..(31): X is T or S
  MISC_FEATURE (32)..(32): X is F or P
  MISC_FEATURE (33)..(33): X  is T or S
  MISC_FEATURE (34)..(34): X is C or S
  MISC_FEATURE (35)..(35): X is I, L or V
  MISC_FEATURE (36)..(36): X is T or S
  MISC_FEATURE (37)..(37): X is T or S

SEQ ID NO: 345 - protein, 36 aa, Artificial
  Completely synthesized peptide construct
DLLKNGERIEKVEGGGNMYAMMIARFKMFPEVKEKG

SEQ ID NO: 346 - protein, 36 aa, Artificial; identical to SEQ ID NO: 172
  peptide construct
  MISC_FEATURE (1)..(1): X is D and E for acidic amino acids
  MISC_FEATURE (2)..(2): X is I, L or V
  MISC_FEATURE (3)..(3): X is I, L or V
  MISC_FEATURE (4)..(4): X is K, R or H for basic amino acids
  MISC_FEATURE (5)..(5): X is N or Q for amidated amino acids
  MISC_FEATURE (6)..(6): X  is A or G
  MISC_FEATURE (7)..(7): X is D and E for acidic amino acids
  MISC_FEATURE (8)..(8): X is K, R or H for basic amino acids
  MISC_FEATURE (9)..(9): X is I, L or V
  MISC_FEATURE (10)..(10): X is D and E for acidic amino acids
  MISC_FEATURE (11)..(11): X is K, R or H for basic amino acids
  MISC_FEATURE (12)..(12): X is I, L or V
  MISC_FEATURE (13)..(13): X is D and E for acidic amino acids
  MISC_FEATURE (14)..(14): X is A or G
  MISC_FEATURE (15)..(15): X is A or G
  MISC_FEATURE (16)..(16): X is A or G
  MISC_FEATURE (17)..(17): X is N or Q for amidated amino acids
  MISC_FEATURE (18)..(18): X is M or Nle
  MISC_FEATURE (19)..(19): X is F, W or Y for aromatic amino acids
  MISC_FEATURE (20)..(20): X is A or G
  MISC_FEATURE (21)..(21): X is M or Nle
  MISC_FEATURE (22)..(22): X is M or Nle
  MISC_FEATURE (23)..(23): X is I, L or V
  MISC_FEATURE (24)..(24): X is A or G
  MISC_FEATURE (25)..(25): X is K, R or H for basic amino acids
  MISC_FEATURE (26)..(26): X  is F, W or Y for aromatic amino acids
  MISC_FEATURE (27)..(27): X is K, R or H for basic amino acids
  MISC_FEATURE (28)..(28): X is M or Nle
  MISC_FEATURE (29)..(29): X is F, W or Y for aromatic amino acids
  MISC_FEATURE (30)..(30): X is F or P
  MISC_FEATURE (31)..(31): X is D and E for acidic amino acids
  MISC_FEATURE (32)..(32): X is I, L or V
  MISC_FEATURE (33)..(33): X is K, R or H for basic amino acids
  MISC_FEATURE (34)..(34): X is D and E for acidic amino acids
  MISC_FEATURE (35)..(35): X is K, R or H for basic amino acids
  MISC_FEATURE (36)..(36): X is A or G

SEQ ID NO: 347 - protein, 49 aa, Artificial
  Completely synthesized peptide construct
DLLKNGERIEKVEGGGNMYAMMIARFKMFPEVKEKGMAALPRLIAFTSE

SEQ ID NO: 348 - protein, 49 aa, Artificial
  peptide construct
  MISC_FEATURE (1)..(1): X is D and E for acidic amino acids
  MISC_FEATURE (2)..(2): X is I, L or V
  MISC_FEATURE (3)..(3): X is I, L or V
  MISC_FEATURE (4)..(4): X is K, R or H for basic amino acids
  MISC_FEATURE (5)..(5): X is N or Q for amidated amino acids
  MISC_FEATURE (6)..(6): X is A or G
  MISC_FEATURE (7)..(7): X is D and E for acidic amino acids
  MISC_FEATURE (8)..(8): X is K, R or H for basic amino acids
  MISC_FEATURE (9)..(9): X is I, L or V
  MISC_FEATURE (10)..(10): X is D and E for acidic amino acids
  MISC_FEATURE (11)..(11): X is K, R or H for basic amino acids
  MISC_FEATURE (12)..(12): X is I, L or V
  MISC_FEATURE (13)..(13): X is D and E for acidic amino acids
  MISC_FEATURE (14)..(14): X is A or G
  MISC_FEATURE (15)..(15): X is A or G
  MISC_FEATURE (16)..(16): X is A or G
  MISC_FEATURE (17)..(17): X is N or Q for amidated amino acids
  MISC_FEATURE (18)..(18): X is M or Nle
  MISC_FEATURE (19)..(19): X is F, W or Y for aromatic amino acids
  MISC_FEATURE (20)..(20): X is A or G
  MISC_FEATURE (21)..(21): X is M or Nle
  MISC_FEATURE (22)..(22): X is M or Nle
  MISC_FEATURE (23)..(23): X is I, L or V
  MISC_FEATURE (24)..(24): X is A or G
  MISC_FEATURE (25)..(25): X is K, R or H for basic amino acids
  MISC_FEATURE (26)..(26): X is F, W or Y for aromatic amino acids
  MISC_FEATURE (27)..(27): X is K, R or H for basic amino acids
  MISC_FEATURE (28)..(28): X is M or Nle
  MISC_FEATURE (29)..(29): X is F, W or Y for aromatic amino acids
  MISC_FEATURE (30)..(30): X is F or P
  MISC_FEATURE (31)..(31): X is D and E for acidic amino acids
  MISC_FEATURE (32)..(32): X is I, L or V
  MISC_FEATURE (33)..(33): X is K, R or H for basic amino acids
  MISC_FEATURE (34)..(34): X is D and E for acidic amino acids
  MISC_FEATURE (35)..(35): X is K, R or H for basic amino acids
  MISC_FEATURE (36)..(36): X is A or G
  MISC_FEATURE (37)..(37): X is M or Nle
  MISC_FEATURE (38)..(38): X is A or G
  MISC_FEATURE (39)..(39): X is A or G
  MISC_FEATURE (40)..(40): X is I, L or V
  MISC_FEATURE (41)..(41): X is F or P
  MISC_FEATURE (42)..(42): X is K, R or H for basic amino acids
  MISC_FEATURE (43)..(43): X is I, L or V
  MISC_FEATURE (44)..(44): X is I, L or V
  MISC_FEATURE (45)..(45): X is A or G
  MISC_FEATURE (46)..(46): X is F,  W or Y for aromatic amino acids
  MISC_FEATURE (47)..(47): X is T or S
  MISC_FEATURE (48)..(48): X is C or S
  MISC_FEATURE (49)..(49): X is D and E for acidic amino acids
XXXXXXXXXXXXXXXXXXXXXXXXXXXXXXXXXXXXXXXXXXXXXXXXX

SEQ ID NO: 349 - protein, 29 aa, Artificial
  Completely synthesized peptide construct
DLLKNGERIEKVEGGGIAFTSEHSHFSLK

SEQ ID NO: 350 - protein, 29 aa, Artificial
  peptide construct
  MISC_FEATURE (1)..(1): X is D and E for acidic amino acids
  MISC_FEATURE (2)..(2): X is I, L or V
  MISC_FEATURE (3)..(3): X is I, L or V
  MISC_FEATURE (4)..(4): X is K, R or H for basic amino acids
  MISC_FEATURE (5)..(5): X is N or Q for amidateda mino acids
  MISC_FEATURE (6)..(6): X is A or G
  MISC_FEATURE (7)..(7): X is D and E for acidic amino acids
  MISC_FEATURE (8)..(8): X is K, R or H for basic amino acids
  MISC_FEATURE (9)..(9): X is I, L or V
  MISC_FEATURE (10)..(10): X is D and E for acidic amino acids
  MISC_FEATURE (11)..(11): X is K, R or H for basic amino acids
  MISC_FEATURE (12)..(12): X is I, L or V
  MISC_FEATURE (13)..(13): X is D and E for acidic amino acids
  MISC_FEATURE (14)..(14): X is A or G
  MISC_FEATURE (15)..(15): X is A or G
  MISC_FEATURE (16)..(16): X is A or G
  MISC_FEATURE (17)..(17): X is I, L or V
  MISC_FEATURE (18)..(18): X is A or G
  MISC_FEATURE (19)..(19): X is F, W or Y for aromatic amino acids
  MISC_FEATURE (20)..(20): X is T or S
  MISC_FEATURE (21)..(21): X is C or S
  MISC_FEATURE (22)..(22): X is D and E for acidic amino acids
  MISC_FEATURE (23)..(23): X is K,  R or H for basic amino acids
  MISC_FEATURE (24)..(24): X is C or S
  MISC_FEATURE (25)..(25): X is K, R or H for basic amino acids
  MISC_FEATURE (26)..(26): X is F, W or Y for aromatic amino acids
  MISC_FEATURE (27)..(27): X is C or S
  MISC_FEATURE (28)..(28): X is I, L or V
  MISC_FEATURE (29)..(29): X is K,R or H for basic amino acids
XXXXXXXXXXXXXXXXXXXXXXXXXXXXX

SEQ ID NO: 351 - protein, 37 aa, Artificial
  Completely synthesized peptide construct
DLLKNGERIEKVEGGGMDFWCVEHDRPPPATPTSLTT

SEQ ID NO: 352 - protein, 37 aa, Artificial; identical to SEQ ID NO: 158
  peptide construct
  MISC_FEATURE (1)..(1): X is D and E for acidic amino acids
  MISC_FEATURE (2)..(2): X is I, L or V
  MISC_FEATURE (3)..(3): X is I, L or V
  MISC_FEATURE (4)..(4): X is K, R or H for basic amino acids
  MISC_FEATURE (5)..(5): X is N or Q for amidated amino acids
  MISC_FEATURE (6)..(6): X is A or G
  MISC_FEATURE (7)..(7): X is D and E for acidic amino acids
  MISC_FEATURE (8)..(8): X is K, R or H for basic amino acids
  MISC_FEATURE (9)..(9): X is I, L or V
  MISC_FEATURE (10)..(10): X is D and E for acidic amino acids
  MISC_FEATURE (11)..(11): X is K, R or H for basic amino acids
  MISC_FEATURE (12)..(12): X is I, L or V
  MISC_FEATURE (13)..(13): X is D and E for acidic amino acids
  MISC_FEATURE (14)..(14): X is A or G
  MISC_FEATURE (15)..(15): X is A or G
  MISC_FEATURE (16)..(16): X is A or G
  MISC_FEATURE (17)..(17): X is M or Nle
  MISC_FEATURE (18)..(18): X is D and E for acidic amino acids
  MISC_FEATURE (19)..(19): X is F, W or Y for aromatic amino acids
  MISC_FEATURE (20)..(20): X is F, W or Y for aromatic amino acids
  MISC_FEATURE (21)..(21): X is C or S
  MISC_FEATURE (22)..(22): X is I, L or V
  MISC_FEATURE (23)..(23): X is D and  E for acidic amino acids
  MISC_FEATURE (24)..(24): X is K, R or H for basic amino acids
  MISC_FEATURE (25)..(25): X is D and E for acidic amino acids
  MISC_FEATURE (26)..(26): X is K, R or H for basic amino acids
  MISC_FEATURE (27)..(27): X is F  or P
  MISC_FEATURE (28)..(28): X is F  or P
  MISC_FEATURE (29)..(29): X is F  or P
  MISC_FEATURE (30)..(30): X is A or G
  MISC_FEATURE (31)..(31): X is T or S
  MISC_FEATURE (32)..(32): X is F or P
  MISC_FEATURE (33)..(33): X is T or S
  MISC_FEATURE (34)..(34): X is C or S
  MISC_FEATURE (35)..(35): X is I, L or V
  MISC_FEATURE (36)..(36): X is T or S
  MISC_FEATURE (37)..(37): X is T or S

SEQ ID NO: 353 - protein, 26 aa, Artificial
  Completely synthesized peptide construct
DLLKNGERIEKVEGGGERPTLAFLQD

SEQ ID NO: 354 - protein, 26 aa, Artificial
  peptide construct
  MISC_FEATURE (1)..(1): X is D and E for acidic amino acids
  MISC_FEATURE (2)..(2): X is I, L or V
  MISC_FEATURE (3)..(3): X is I, L or V
  MISC_FEATURE (4)..(4): X is K, R or H for basic amino acids
  MISC_FEATURE (5)..(5): X is N or Q for amidated amino acids
  MISC_FEATURE (6)..(6): X is A or G
  MISC_FEATURE (7)..(7): X is D and E for acidic amino acids
  MISC_FEATURE (8)..(8): X is K, R or H for basic amino acids
  MISC_FEATURE (9)..(9): X is I, L or V
  MISC_FEATURE (10)..(10): X is D and E for acidic amino acids
  MISC_FEATURE (11)..(11): X is K, R or H for basic amino acids
  MISC_FEATURE (12)..(12): X is I, L or V
  MISC_FEATURE (13)..(13): X is D and E for acidic amino acids
  MISC_FEATURE (14)..(14): X is A or G
  MISC_FEATURE (15)..(15): X is A or G
  MISC_FEATURE (16)..(16): X is A or G
  MISC_FEATURE (17)..(17): X is D and E for acidic amino acids
  MISC_FEATURE (18)..(18): X is K, R or H for basic amino acids
  MISC_FEATURE (19)..(19): X is F or P
  MISC_FEATURE (20)..(20): X is T or S
  MISC_FEATURE (21)..(21): X is I, L or V
  MISC_FEATURE (22)..(22): X is A or G
  MISC_FEATURE (23)..(23): X is F, W or Y for aromatic amino acids
  MISC_FEATURE (24)..(24): X is I, L or V
  MISC_FEATURE (25)..(25): X is N or Q for amidated amino acids
  MISC_FEATURE (26)..(26): X is D and E for acidic amino acids
XXXXXXXXXXXXXXXXXXXXXXXXXX

SEQ ID NO: 355 - protein, 26 aa, Artificial
  Completely synthesized peptide construct
DLLKNGERIEKVEGGGDRSTKVIDFH

SEQ ID NO: 356 - protein, 26 aa, Artificial
  peptide construct
  MISC_FEATURE (1)..(1): X is D and E for acidic amino acids
  MISC_FEATURE (2)..(2): X is I, L or V
  MISC_FEATURE (3)..(3): X is I, L or V
  MISC_FEATURE (4)..(4): X is K, R or H for basic amino acids
  MISC_FEATURE (5)..(5): X is N or Q for amidated amino acids
  MISC_FEATURE (6)..(6): X is A or G
  MISC_FEATURE (7)..(7): X is D and E for acidic amino acids
  MISC_FEATURE (8)..(8): X is K, R or H for basic amino acids
  MISC_FEATURE (9)..(9): X is I, L or V
  MISC_FEATURE (10)..(10): X is D and E for acidic amino acids
  MISC_FEATURE (11)..(11): X is K, R or H for basic amino acids
  MISC_FEATURE (12)..(12): X is I, L or V
  MISC_FEATURE (13)..(13): X is D and E for acidic amino acids
  MISC_FEATURE (14)..(14): X is A or G
  MISC_FEATURE (15)..(15): X is A or G
  MISC_FEATURE (16)..(16): X is A or G
  MISC_FEATURE (17)..(17): X is D and E for acidic amino acids
  MISC_FEATURE (18)..(18): X is K, R or H for basic amino acids
  MISC_FEATURE (19)..(19): X is C or S
  MISC_FEATURE (20)..(20): X is T or S
  MISC_FEATURE (21)..(21): X is K, R or H for basic amino acids
  MISC_FEATURE (22)..(22): X is I, L or V
  MISC_FEATURE (23)..(23): X is I, L or V
  MISC_FEATURE (24)..(24): X is D and E for acidic amino acids
  MISC_FEATURE (25)..(25): X is F, W or Y for aromatic amino acids
  MISC_FEATURE (26)..(26): X is K, R or H for basic amino acids
XXXXXXXXXXXXXXXXXXXXXXXXXX

SEQ ID NO: 357 - protein, 29 aa, Artificial
  Completely synthesized peptide construct
DLLKNGERIEKVEGGGIAGFKGEQGPKGE

SEQ ID NO: 358 - protein, 29 aa, Artificial
  peptide construct
  MISC_FEATURE (1)..(1): X is D and E for acidic amino acids
  MISC_FEATURE (2)..(2): X is I, L or V
  MISC_FEATURE (3)..(3): X is I, L or V
  MISC_FEATURE (4)..(4): X is K, R or H for basic amino acids
  MISC_FEATURE (5)..(5): X is N or Q for amidated amino acids
  MISC_FEATURE (6)..(6): X is A or G
  MISC_FEATURE (7)..(7): X is D and E for acidic amino acids
  MISC_FEATURE (8)..(8): X is K, R or H for basic amino acids
  MISC_FEATURE (9)..(9): X is I, L or V
  MISC_FEATURE (10)..(10): X is D and E for acidic amino acids
  MISC_FEATURE (11)..(11): X is K, R or H for basic amino acids
  MISC_FEATURE (12)..(12): X is I, L or V
  MISC_FEATURE (13)..(13): X is D and E for acidic amino acids
  MISC_FEATURE (14)..(14): X is A or G
  MISC_FEATURE (15)..(15): X is A or G
  MISC_FEATURE (16)..(16): X is A or G
  MISC_FEATURE (17)..(17): X is I, L or V
  MISC_FEATURE (18)..(18): X is A or G
  MISC_FEATURE (19)..(19): X is A or G
  MISC_FEATURE (20)..(20): X is F, W or Y for aromatic amino acids
  MISC_FEATURE (21)..(21): X is K, R or H for basic amino acids
  MISC_FEATURE (22)..(22): X is A or G
  MISC_FEATURE (23)..(23): X is D and E for acidic amino acids
  MISC_FEATURE (24)..(24): X is N or Q for amidated amino acids
  MISC_FEATURE (25)..(25): X is A or G
  MISC_FEATURE (26)..(26): X is F or P
  MISC_FEATURE (27)..(27): X is K, R or H for basic amino acids
  MISC_FEATURE (28)..(28): X is A or G
  MISC_FEATURE (29)..(29): X is D and E for acidic amino acids
XXXXXXXXXXXXXXXXXXXXXXXXXXXXX

SEQ ID NO: 359 - protein, 16 aa, Artificial
  Completely synthesized peptide construct
DLLKNGERIEKVEGGG

SEQ ID NO: 360 - protein, 16 aa, Artificial
  peptide construct
  MISC_FEATURE (1)..(1): X is D and E for acidic amino acids
  MISC_FEATURE (2)..(2): X is I, L or V
  MISC_FEATURE (3)..(3): X is I, L or V
  MISC_FEATURE (4)..(4): X is K, R or H for basic amino acids
  MISC_FEATURE (5)..(5): X is N or Q for amidated amino acids
  MISC_FEATURE (6)..(6): X is A or G
  MISC_FEATURE (7)..(7): X is D and E for acidic amino acids
  MISC_FEATURE (8)..(8): X is K, R or H for basic amino acids
  MISC_FEATURE (9)..(9): X is I, L or V
  MISC_FEATURE (10)..(10): X is D and E for acidic amino acids
  MISC_FEATURE (11)..(11): X is K, R or H for basic amino acids
  MISC_FEATURE (12)..(12): X is I, L or V
  MISC_FEATURE (13)..(13): X is D and E for acidic amino acids
  MISC_FEATURE (14)..(14): X is A or G
  MISC_FEATURE (15)..(15): X is A or G
  MISC_FEATURE (16)..(16): X is A or G
XXXXXXXXXXXXXXXX

SEQ ID NO: 361 - protein, 24 aa, Artificial
  Completely synthesized peptide construct
DLLKNGERIEKVEGGGKNIVTPRT

SEQ ID NO: 362 - protein, 24 aa, Artificial
  peptide construct
  MISC_FEATURE (1)..(1): X is D and E for acidic amino acids
  MISC_FEATURE (2)..(2): X is I, L or V
  MISC_FEATURE (3)..(3): X is I, L or V
  MISC_FEATURE (4)..(4): X is K, R or H for basic amino acids
  MISC_FEATURE (5)..(5): X is N or Q for amidated amino acids
  MISC_FEATURE (6)..(6): X is A or G
  MISC_FEATURE (7)..(7): X is D and E for acidic amino acids
  MISC_FEATURE (8)..(8): X is K, R or H for basic amino acids
  MISC_FEATURE (9)..(9): X is I, L or V
  MISC_FEATURE (10)..(10): X is D and E for acidic amino acids
  MISC_FEATURE (11)..(11): X is K, R or H for basic amino acids
  MISC_FEATURE (12)..(12): X is I, L or V
  MISC_FEATURE (13)..(13): X is D and E for acidic amino acids
  MISC_FEATURE (14)..(14): X is A or G
  MISC_FEATURE (15)..(15): X is A or G
  MISC_FEATURE (16)..(16): X is A or G
  MISC_FEATURE (17)..(17): X is K, R or H for basic amino acids
  MISC_FEATURE (18)..(18): X is N or Q for amidated amino acids
  MISC_FEATURE (19)..(19): X is I, L or V
  MISC_FEATURE (20)..(20): X is I, L or V
  MISC_FEATURE (21)..(21): X is T or S
  MISC_FEATURE (22)..(22): X is F or P
  MISC_FEATURE (23)..(23): X is K, R or H for basic amino acids
  MISC_FEATURE (24)..(24): X is T or S
XXXXXXXXXXXXXXXXXXXXXXXX

SEQ ID NO: 363 - protein, 31 aa, Artificial
  Completely synthesized peptide construct
DLLKNGERIEKVEGGGGDKVSFFCKNKEKKC

SEQ ID NO: 364 - protein, 31 aa, Artificial; identical to SEQ ID NO: 130
  peptide construct
  MISC_FEATURE (1)..(1): X is D and E for acidic amino acids
  MISC_FEATURE (2)..(2): X is I, L or V
  MISC_FEATURE (3)..(3): X is I, L or V
  MISC_FEATURE (4)..(4): X is K, R or H for basic amino acids
  MISC_FEATURE (5)..(5): X is N or Q for amidated amino acids
  MISC_FEATURE (6)..(6): X is A or G
  MISC_FEATURE (7)..(7): X is D and E for acidic amino acids
  MISC_FEATURE (8)..(8): X is K, R or H for basic amino acids
  MISC_FEATURE (9)..(9): X is I, L or V
  MISC_FEATURE (10)..(10): X is D and E for acidic amino acids
  MISC_FEATURE (11)..(11): X is K, R or H for basic amino acids
  MISC_FEATURE (12)..(12): X is I, L or V
  MISC_FEATURE (13)..(13): X is D and E for acidic amino acids
  MISC_FEATURE (14)..(14): X is A or G
  MISC_FEATURE (15)..(15): X is A or G
  MISC_FEATURE (16)..(16): X is A or G
  MISC_FEATURE (17)..(17): X is A or G
  MISC_FEATURE (18)..(18): X is D and E for acidic amino acids
  MISC_FEATURE (19)..(19): X is K, R or H for basic amino acids
  MISC_FEATURE (20)..(20): X is I, L or V
  MISC_FEATURE (21)..(21): X is C or S
  MISC_FEATURE (22)..(22): X is F, W or Y for aromatic amino acids
  MISC_FEATURE (23)..(23): X is F, W or Y for aromatic amino acids
  MISC_FEATURE (24)..(24): X is C or S
  MISC_FEATURE (25)..(25): X is K, R or H for basic amino acids
  MISC_FEATURE (26)..(26): X is N or Q for aromatic amino acids
  MISC_FEATURE (27)..(27): X is K, R or H for basic amino acids
  MISC_FEATURE (28)..(28): X is D and E for acidic amino acids
  MISC_FEATURE (29)..(29): X is K, R or H for basic amino acids
  MISC_FEATURE (30)..(30): X is K, R or H for basic amino acids
  MISC_FEATURE (31)..(31): X is C or S

SEQ ID NO: 365 - protein, 33 aa, Artificial
  Completely synthesized peptide construct
DLLKNGERIEKVEGGGEIIVTHFPFDEQNCSMK

SEQ ID NO: 366 - protein, 33 aa, Artificial; identical to SEQ ID NO: 99
  peptide construct
  MISC_FEATURE (1)..(1): X is D and E for acidic amino acids
  MISC_FEATURE (2)..(2): X is I, L or V
  MISC_FEATURE (3)..(3): X is I, L or V
  MISC_FEATURE (4)..(4): X is K, R or H for basic amino acids
  MISC_FEATURE (5)..(5): X is N or Q for amidated amino acids
  MISC_FEATURE (6)..(6): X is A or G
  MISC_FEATURE (7)..(7): X is D and E for acidic amino acids
  MISC_FEATURE (8)..(8): X is K, R or H for basic amino acids
  MISC_FEATURE (9)..(9): X is I, L or V
  MISC_FEATURE (10)..(10): X is D and E for acidic amino acids
  MISC_FEATURE (11)..(11): X is K, R or H for basic amino acids
  MISC_FEATURE (12)..(12): X is I, L or V
  MISC_FEATURE (13)..(13): X is D and E for acidic amino acids
  MISC_FEATURE (14)..(14): X is A or G
  MISC_FEATURE (15)..(15): X is A or G
  MISC_FEATURE (16)..(16): X is A or G
  MISC_FEATURE (17)..(17): X is D and E for acidic amino acids
  MISC_FEATURE (18)..(18): X is I, L or V
  MISC_FEATURE (19)..(19): X is I, L or V
  MISC_FEATURE (20)..(20): X is I, L or V
  MISC_FEATURE (21)..(21): X is T or S
  MISC_FEATURE (22)..(22): X is K, R or H for basic amino acids
  MISC_FEATURE (23)..(23): X is F, W or Y for aromatic amino acids
  MISC_FEATURE (24)..(24): X is F or P
  MISC_FEATURE (25)..(25): X is F, W or Y for aromatic amino acids
  MISC_FEATURE (26)..(26): X is D and E for acidic amino acids
  MISC_FEATURE (27)..(27): X is D and E for acidic amino acids
  MISC_FEATURE (28)..(28): X is N or Q for aromatic amino acids
  MISC_FEATURE (29)..(29): X is N or Q for aromatic amino acids
  MISC_FEATURE (30)..(30): X is C or S
  MISC_FEATURE (31)..(31): X is C or S
  MISC_FEATURE (32)..(32): X is M or Nle
  MISC_FEATURE (33)..(33): X is K, R or H for basic amino acids

SEQ ID NO: 367 - protein, 29 aa, Artificial
  Completely synthesized peptide construct
DLLKNGERIEKVEGGGVHFFKNIVTPRTP

SEQ ID NO: 368 - protein, 29 aa, Artificial
  peptide construct
  MISC_FEATURE (1)..(1): X is D and E for acidic amino acids
  MISC_FEATURE (2)..(2): X is I, L or V
  MISC_FEATURE (3)..(3): X is I, L or V
  MISC_FEATURE (4)..(4): X is K, R or H for basic amino acids
  MISC_FEATURE (5)..(5): X is N or Q for amidated amino acids
  MISC_FEATURE (6)..(6): X is A or G
  MISC_FEATURE (7)..(7): X is D and E for acidic amino acids
  MISC_FEATURE (8)..(8): X is K, R or H for basic amino acids
  MISC_FEATURE (9)..(9): X is I, L or V
  MISC_FEATURE (10)..(10): X is D and E for acidic amino acids
  MISC_FEATURE (11)..(11): X is K, R or H for basic amino acids
  MISC_FEATURE (12)..(12): X is I, L or V
  MISC_FEATURE (13)..(13): X is D and E for acidic amino acids
  MISC_FEATURE (14)..(14): X is A or G
  MISC_FEATURE (15)..(15): X is A or G
  MISC_FEATURE (16)..(16): X is A or G
  MISC_FEATURE (17)..(17): X is I, L or V
  MISC_FEATURE (18)..(18): X is K, R or H for basic amino acids
  MISC_FEATURE (19)..(19): X is F, W or Y for aromatic amino acids
  MISC_FEATURE (20)..(20): X is F, W or Y for aromatic amino acids
  MISC_FEATURE (21)..(21): X is K, R or H for basic amino acids
  MISC_FEATURE (22)..(22): X is N or Q for amidated amino acids
  MISC_FEATURE (23)..(23): X is I, L or V
  MISC_FEATURE (24)..(24): X is I,  L or V
  MISC_FEATURE (25)..(25): X is T or S
  MISC_FEATURE (26)..(26): X is F or P
  MISC_FEATURE (27)..(27): X is K, R or H for basic amino acids
  MISC_FEATURE (28)..(28): X is T or S
  MISC_FEATURE (29)..(29): X is F or P
XXXXXXXXXXXXXXXXXXXXXXXXXXXXX

SEQ ID NO: 369 - protein, 33 aa, Artificial
  Completely synthesized peptide construct
DLLKNGERIEKVEGGGYQQLNSERGVPNENIEN

SEQ ID NO: 370 - protein, 33 aa, Artificial; identical to SEQ ID NO: 99
  peptide construct
  MISC_FEATURE (1)..(1): X is D and E for acidic amino acids
  MISC_FEATURE (2)..(2): X is I, L or V
  MISC_FEATURE (3)..(3): X is I, L or V
  MISC_FEATURE (4)..(4): X is K, R or H for basic amino acids
  MISC_FEATURE (5)..(5): X is N or Q for amidated amino acids
  MISC_FEATURE (6)..(6): X is A or G
  MISC_FEATURE (7)..(7): X is D and E for acidic amino acids
  MISC_FEATURE (8)..(8): X is K, R or H for basic amino acids
  MISC_FEATURE (9)..(9): X is I, L or V
  MISC_FEATURE (10)..(10): X is D and E for acidic amino acids
  MISC_FEATURE (11)..(11): X is K, R or H for basic amino acids
  MISC_FEATURE (12)..(12): X is I, L or V
  MISC_FEATURE (13)..(13): X is D and E for acidic amino acids
  MISC_FEATURE (14)..(14): X is A or G
  MISC_FEATURE (15)..(15): X is A or G
  MISC_FEATURE (16)..(16): X is A or G
  MISC_FEATURE (17)..(17): X is F, W or Y for aromatic amino acids
  MISC_FEATURE (18)..(18): X is N or Q for aromatic amino acids
  MISC_FEATURE (19)..(19): X is N or Q for amidated amino acids
  MISC_FEATURE (20)..(20): X is I, L or V
  MISC_FEATURE (21)..(21): X is N or Q for amidated amino acids
  MISC_FEATURE (22)..(22): X is C or S
  MISC_FEATURE (23)..(23): X is D and E for acidic amino acids
  MISC_FEATURE (24)..(24): X is K, R or H for basic amino acids
  MISC_FEATURE (25)..(25): X is A or G
  MISC_FEATURE (26)..(26): X is I, L or V
  MISC_FEATURE (27)..(27): X is F or P
  MISC_FEATURE (28)..(28): X is N or Q for amidated amino acids
  MISC_FEATURE (29)..(29): X is D and E for acidic amino acids
  MISC_FEATURE (30)..(30): X is N or Q for amidated amino acids
  MISC_FEATURE (31)..(31): X is I, L or V
  MISC_FEATURE (32)..(32): X is D and E for acidic amino acids
  MISC_FEATURE (33)..(33): X is N or Q for amidated amino acids

SEQ ID NO: 371 - protein, 29 aa, Artificial
  Completely synthesized peptide construct
DLLKNGERIEKVEGGGVFIKRVSNVIIHG

SEQ ID NO: 372 - protein, 29 aa, Artificial
  peptide construct
  MISC_FEATURE (1)..(1): X is D and E for acidic amino acids
  MISC_FEATURE (2)..(2): X is I, L or V
  MISC_FEATURE (3)..(3): X is I, L or V
  MISC_FEATURE (4)..(4): X is K, R or H for basic amino acids
  MISC_FEATURE (5)..(5): X is N or Q for amidated amino acids
  MISC_FEATURE (6)..(6): X is A or G
  MISC_FEATURE (7)..(7): X is D and E for acidic amino acids
  MISC_FEATURE (8)..(8): X is K, R or H for basic amino acids
  MISC_FEATURE (9)..(9): X is I, L or V
  MISC_FEATURE (10)..(10): X is D and E for acidic amino acids
  MISC_FEATURE (11)..(11): X is K, R or H for basic amino acids
  MISC_FEATURE (12)..(12): X is I, L or V
  MISC_FEATURE (13)..(13): X is D and E for acidic amino acids
  MISC_FEATURE (14)..(14): X is A or G
  MISC_FEATURE (15)..(15): X is A or G
  MISC_FEATURE (16)..(16): X is A or G
  MISC_FEATURE (17)..(17): X is I, L or V
  MISC_FEATURE (18)..(18): X is F, W or Y for aromatic amino acids
  MISC_FEATURE (19)..(19): X is I, L or V
  MISC_FEATURE (20)..(20): X is K, R or H for basic amino acids
  MISC_FEATURE (21)..(21): X is K, R or H for basic amino acids
  MISC_FEATURE (22)..(22): X is I, L or V
  MISC_FEATURE (23)..(23): X is C or S
  MISC_FEATURE (24)..(24): X is N or Q for amidated amino acids
  MISC_FEATURE (25)..(25): X is I, L or V
  MISC_FEATURE (26)..(26): X is I, L or V
  MISC_FEATURE (27)..(27): X is I, L or V
  MISC_FEATURE (28)..(28): X is K, R or H for basic amino acids
  MISC_FEATURE (29)..(29): X is A or G
XXXXXXXXXXXXXXXXXXXXXXXXXXXXX

SEQ ID NO: 373 - protein, 31 aa, Artificial
  Completely synthesized peptide construct
DLLKNGERIEKVEGGGMKVTVAFNQFGPNRR

SEQ ID NO: 374 - protein, 31 aa, Artificial; identical to SEQ ID NO: 130
  peptide construct
  MISC_FEATURE (1)..(1): X is D and E for acidic amino acids
  MISC_FEATURE (2)..(2): X is I, L or V
  MISC_FEATURE (3)..(3): X is I, L or V
  MISC_FEATURE (4)..(4): X is K, R or H for basic amino acids
  MISC_FEATURE (5)..(5): X is N or Q for amidated amino acids
  MISC_FEATURE (6)..(6): X is A or G
  MISC_FEATURE (7)..(7): X is D and E for acidic amino acids
  MISC_FEATURE (8)..(8): X is K, R or H for basic amino acids
  MISC_FEATURE (9)..(9): X is I, L or V
  MISC_FEATURE (10)..(10): X is D and E for acidic amino acids
  MISC_FEATURE (11)..(11): X is K, R or H for basic amino acids
  MISC_FEATURE (12)..(12): X is I, L or V
  MISC_FEATURE (13)..(13): X is D and E for acidic amino acids
  MISC_FEATURE (14)..(14): X is A or G
  MISC_FEATURE (15)..(15): X is A or G
  MISC_FEATURE (16)..(16): X is A or G
  MISC_FEATURE (17)..(17): X is M or Nle
  MISC_FEATURE (18)..(18): X is K, R or H for basic amino acids
  MISC_FEATURE (19)..(19): X is I,  L or V
  MISC_FEATURE (20)..(20): X is T or S
  MISC_FEATURE (21)..(21): X is I, L or V
  MISC_FEATURE (22)..(22): X is A or G
  MISC_FEATURE (23)..(23): X is F, W or Y for aromatic amino acids
  MISC_FEATURE (24)..(24): X is N or Q for amidated amino acids
  MISC_FEATURE (25)..(25): X is N or Q for amidated amino acids
  MISC_FEATURE (26)..(26): X is F, W or Y for aromatic amino acids
  MISC_FEATURE (27)..(27): X is A or G
  MISC_FEATURE (28)..(28): X is F or P
  MISC_FEATURE (29)..(29): X is N or Q for amidated amino acids
  MISC_FEATURE (30)..(30): X is K, R or H for basic amino acids
  MISC_FEATURE (31)..(31): X is K, R or H for basic amino acids

SEQ ID NO: 375 - protein, 31 aa, Artificial
  Completely synthesized peptide construct
DLLKNGERIEKVEGGGIASRRVDGIIAAYQN

SEQ ID NO: 376 - protein, 31 aa, Artificial; identical to SEQ ID NO: 130
  peptide construct
  MISC_FEATURE (1)..(1): X is D and E for acidic amino acids
  MISC_FEATURE (2)..(2): X is I, L or V
  MISC_FEATURE (3)..(3): X is I, L or V
  MISC_FEATURE (4)..(4): X is K, R or H for basic amino
  MISC_FEATURE (5)..(5): X is N or Q for amidated amino acids
  MISC_FEATURE (6)..(6): X is A or G
  MISC_FEATURE (7)..(7): X is D and E for acidic amino acids
  MISC_FEATURE (8)..(8): X is K, R or H for basic amino acids
  MISC_FEATURE (9)..(9): X is I, L or V
  MISC_FEATURE (10)..(10): X is D and E for acidic amino acids
  MISC_FEATURE (11)..(11): X is K, R or H for basic amino acids
  MISC_FEATURE (12)..(12): X is I, L or V
  MISC_FEATURE (13)..(13): X is D and E for acidic amino acids
  MISC_FEATURE (14)..(14): X is A or G
  MISC_FEATURE (15)..(15): X is A or G
  MISC_FEATURE (16)..(16): X is A or G
  MISC_FEATURE (17)..(17): X is I, L or V
  MISC_FEATURE (18)..(18): X is A or G
  MISC_FEATURE (19)..(19): X is C or S
  MISC_FEATURE (20)..(20): X is K, R or H for basic amino acids
  MISC_FEATURE (21)..(21): X is K, R or H for basic amino acids
  MISC_FEATURE (22)..(22): X is I, L or V
  MISC_FEATURE (23)..(23): X is D and E for acidic amino acids
  MISC_FEATURE (24)..(24): X is A or G
  MISC_FEATURE (25)..(25): X is I, L or V
  MISC_FEATURE (26)..(26): X is I, L or V
  MISC_FEATURE (27)..(27): X is A or G
  MISC_FEATURE (28)..(28): X is A or G
  MISC_FEATURE (29)..(29): X is F, W or Y for aromatic amino acids
  MISC_FEATURE (30)..(30): X is N or Q for aromatic amino acids
  MISC_FEATURE (31)..(31): X is N or Q for aromatic amino acids

SEQ ID NO: 377 - protein, 35 aa, Artificial
  Completely synthesized peptide construct
DLLKNGERIEKVEGGGIDIFASKNFHLQKNTIGTG

SEQ ID NO: 378 - protein, 35 aa, Artificial; identical to SEQ ID NO: 206
  peptide construct
  MISC_FEATURE (1)..(1): X is D and E for acidic amino acids
  MISC_FEATURE (2)..(2): X is I, L or V
  MISC_FEATURE (3)..(3): X is I, L or V
  MISC_FEATURE (4)..(4): X is K, R or H for basic amino acids
  MISC_FEATURE (5)..(5): X is N or Q for amidated amino acids
  MISC_FEATURE (6)..(6): X is A or G
  MISC_FEATURE (7)..(7): X is D and E for acidic amino acids
  MISC_FEATURE (8)..(8): X is K, R or H for basic amino acids
  MISC_FEATURE (9)..(9): X is I, L or V
  MISC_FEATURE (10)..(10): X is D and E for acidic amino acids
  MISC_FEATURE (11)..(11): X is K, R or H for basic amino acids
  MISC_FEATURE (12)..(12): X is I, L or V
  MISC_FEATURE (13)..(13): X is D and E for acidic amino acids
  MISC_FEATURE (14)..(14): X is A or G
  MISC_FEATURE (15)..(15): X is A or G
  MISC_FEATURE (16)..(16): X is A or G
  MISC_FEATURE (17)..(17): X is I, L or V
  MISC_FEATURE (18)..(18): X is D and E for acidic amino acids
  MISC_FEATURE (19)..(19): X is I, L or V
  MISC_FEATURE (20)..(20): X is F, W or Y for aromatic amino acids
  MISC_FEATURE (21)..(21): X is A or G
  MISC_FEATURE (22)..(22): X is C or S
  MISC_FEATURE (23)..(23): X is K, R or H for basic amino acids
  MISC_FEATURE (24)..(24): X is N or Q for amidated amino acids
  MISC_FEATURE (25)..(25): X is F, W or Y for aromatic amino acids
  MISC_FEATURE (26)..(26): X is K, R or H for basic amino acids
  MISC_FEATURE (27)..(27): X is I, L or V
  MISC_FEATURE (28)..(28): X is N or Q for amidated amino acids
  MISC_FEATURE (29)..(29): X is K, R or H for basic amino acids
  MISC_FEATURE (30)..(30): X is N or Q for amidated amino acids
  MISC_FEATURE (31)..(31): X is T or S
  MISC_FEATURE (32)..(32): X is I, L or V
  MISC_FEATURE (33)..(33): X is A or G
  MISC_FEATURE (34)..(34): X is T or S
  MISC_FEATURE (35)..(35): X is A or G

SEQ ID NO: 379 - protein, 41 aa, Artificial
  Completely synthesized peptide construct
DLLKNGERIEKVEGGGGIGAVLKVLTTGPALISWIKRKRQQ

SEQ ID NO: 380 - protein, 41 aa, Artificial
  peptide construct
  MISC_FEATURE (1)..(1): X is D and E for acidic amino acids
  MISC_FEATURE (2)..(2): X is I, L or V
  MISC_FEATURE (3)..(3): X is I, L or V
  MISC_FEATURE (4)..(4): X is K, R or H for basic amino acids
  MISC_FEATURE (5)..(5): X is N or Q for amidated amino acids
  MISC_FEATURE (6)..(6): X is A or G
  MISC_FEATURE (7)..(7): X is D and E for acidic amino acids
  MISC_FEATURE (8)..(8): X is K, R or H for basic amino acids
  MISC_FEATURE (9)..(9): X is I, L or V
  MISC_FEATURE (10)..(10): X is D and E for acidic amino acids
  MISC_FEATURE (11)..(11): X is K, R or H for basic amino acids
  MISC_FEATURE (12)..(12): X is I, L or V
  MISC_FEATURE (13)..(13): X is D and E for acidic amino acids
  MISC_FEATURE (14)..(14): X is A or G
  MISC_FEATURE (15)..(15): X is A or G
  MISC_FEATURE (16)..(16): X is A or G
  MISC_FEATURE (17)..(17): X is A or G
  MISC_FEATURE (18)..(18): X is I, L or V
  MISC_FEATURE (19)..(19): X is A or G
  MISC_FEATURE (20)..(20): X is A or G
  MISC_FEATURE (21)..(21): X is I, L or V
  MISC_FEATURE (22)..(22): X is I, L or V
  MISC_FEATURE (23)..(23): X is K, R or H for basic amino acids
  MISC_FEATURE (24)..(24): X is I, L or V
  MISC_FEATURE (25)..(25): X is I, L or V
  MISC_FEATURE (26)..(26): X is T or S
  MISC_FEATURE (27)..(27): X is T or S
  MISC_FEATURE (28)..(28): X is A or G
  MISC_FEATURE (29)..(29): X is F or P
  MISC_FEATURE (30)..(30): X is A or G
  MISC_FEATURE (31)..(31): X is I, L or V
  MISC_FEATURE (32)..(32): X is I, L or V
  MISC_FEATURE (33)..(33): X is C or S
  MISC_FEATURE (34)..(34): X is F, W or Y for aromatic amino acids
  MISC_FEATURE (35)..(35): X is I, L or V
  MISC_FEATURE (36)..(36): X is K, R or H for basic amino acids
  MISC_FEATURE (37)..(37): X is K, R or H for basic amino acids
  MISC_FEATURE (38)..(38): X is K, R or H for basic amino acids
  MISC_FEATURE (39)..(39): X is K, R or H for basic amino acids
  MISC_FEATURE (40)..(40): X is N or Q for amidated amino acids
  MISC_FEATURE (41)..(41): X is N or Q for amidated amino acids
  MISC_FEATURE (41)..(41): X is N or Q for amidated amino acids
XXXXXXXXXXXXXXXXXXXXXXXXXXXXXXXXXXXXXXXXX

SEQ ID NO: 381 - protein, 56 aa, Artificial
  Completely synthesized peptide construct
DAEFRHDSGYEVHHQKLVFFAEDVGSNKGAIIGLMVGGVVGGGDLLKNGERIEKVE

SEQ ID NO: 382 - protein, 56 aa, Artificial; identical to SEQ ID NO: 302
  peptide construct
  MISC_FEATURE (1)..(1): X is D and E for acidic amino acids
  MISC_FEATURE (2)..(2): X is A or G
  MISC_FEATURE (3)..(3): X is D and  E for acidic amino acids
  MISC_FEATURE (4)..(4): X is F,  W or Y for aromatic amino acids
  MISC_FEATURE (5)..(5): X is K, R or H for basic amino acids
  MISC_FEATURE (6)..(6): X is K, R or H for basic amino acids
  MISC_FEATURE (7)..(7): X is D and E for acidic amino acids
  MISC_FEATURE (8)..(8): X is T or S
  MISC_FEATURE (9)..(9): X is A or G
  MISC_FEATURE (10)..(10): X is F, W or Y for aromatic amino acids
  MISC_FEATURE (11)..(11): X is D and E for acidic amino acids
  MISC_FEATURE (12)..(12): X is I, L or V
  MISC_FEATURE (13)..(13): X is K, R or H for basic amino acids
  MISC_FEATURE (14)..(14): X is K, R or H for basic amino acids
  MISC_FEATURE (15)..(15): X is N or Q for amidated amino acids
  MISC_FEATURE (16)..(16): X is K, R or H for basic amino acids
  MISC_FEATURE (17)..(17): X is I, L or V
  MISC_FEATURE (18)..(18): X is I, L or V
  MISC_FEATURE (19)..(19): X is F, W or Y for aromatic amino acids
  MISC_FEATURE (20)..(20): X is F, W or Y for aromatic amino acids
  MISC_FEATURE (21)..(21): X is A or G
  MISC_FEATURE (22)..(22): X is D and E for acidic amino acids
  MISC_FEATURE (23)..(23): X is D and E for acidic amino acids
  MISC_FEATURE (24)..(24): X is I, L or V
  MISC_FEATURE (25)..(25): X is A or G
  MISC_FEATURE (26)..(26): X is C or S
  MISC_FEATURE (27)..(27): X is N or Q for amidated amino acids
  MISC_FEATURE (28)..(28): X is K, R or H for basic amino acids
  MISC_FEATURE (29)..(29): X is A or G
  MISC_FEATURE (30)..(30): X is A or G
  MISC_FEATURE (31)..(31): X is I, L or V
  MISC_FEATURE (32)..(32): X is I, L or V
  MISC_FEATURE (33)..(33): X is A or G
  MISC_FEATURE (34)..(34): X is I, L or V
  MISC_FEATURE (35)..(35): X is M or Nle
  MISC_FEATURE (36)..(36): X is I, L or V
  MISC_FEATURE (37)..(37): X is A or G
  MISC_FEATURE (38)..(38): X is A or G
  MISC_FEATURE (39)..(39): X is I, L or V
  MISC_FEATURE (40)..(40): X is I, L or V
  MISC_FEATURE (41)..(41): X is A and G
  MISC_FEATURE (42)..(42): X is A and G
  MISC_FEATURE (43)..(43): X is A and G
  MISC_FEATURE (44)..(44): X is D and E for acidic amino acids
  MISC_FEATURE (45)..(45): X is I, L or V
  MISC_FEATURE (46)..(46): X is I, L or V
  MISC_FEATURE (47)..(47): X is K, R or H for basic amino acids
  MISC_FEATURE (48)..(48): X is N or Q for amidated amino acids
  MISC_FEATURE (49)..(49): X is A and G
  MISC_FEATURE (50)..(50): X is D and E for acidic amino acids
  MISC_FEATURE (51)..(51): X is K, R or H for basic amino acids
  MISC_FEATURE (52)..(52): X is I, L or V
  MISC_FEATURE (53)..(53): X is D and E for acidic amino acids
  MISC_FEATURE (54)..(54): X is K, R or H for basic amino acids
  MISC_FEATURE (55)..(55): X is I, L or V
  MISC_FEATURE (56)..(56): X is D and E for acidic amino acids

SEQ ID NO: 383 - protein, 43 aa, Artificial
  Completely synthesized peptide construct
DAEFRHDSGYEVHHQKLVFFAENVGSNKGGDLLKNGERIEKVE

SEQ ID NO: 384 - protein, 44 aa, Artificial; identical to SEQ ID NO: 304
  peptide construct
  MISC_FEATURE (1)..(1): X is D and E for acidic amino acids
  MISC_FEATURE (2)..(2): X is A or G
  MISC_FEATURE (3)..(3): X is D and E for acidic amino acids
  MISC_FEATURE (4)..(4): X is F, W or Y for aromatic amino acids
  MISC_FEATURE (5)..(5): X is K, R or H for basic amino acids
  MISC_FEATURE (6)..(6): X is K, R or H for basic amino acids
  MISC_FEATURE (7)..(7): X is D and E for acidic amino acids
  MISC_FEATURE (8)..(8): X is T or S
  MISC_FEATURE (9)..(9): X is A or G
  MISC_FEATURE (10)..(10): X is F, W or Y for aromatic amino acids
  MISC_FEATURE (11)..(11): X is A and G
  MISC_FEATURE (12)..(12): X is A and G
  MISC_FEATURE (13)..(13): X is A and G
  MISC_FEATURE (14)..(14): X is D and E for acidic amino acids
  MISC_FEATURE (15)..(15): X is I, L or V
  MISC_FEATURE (16)..(16): X is K, R or H for basic amino acids
  MISC_FEATURE (17)..(17): X is K, R or H for basic amino acids
  MISC_FEATURE (18)..(18): X is N or Q for amidated amino acids
  MISC_FEATURE (19)..(19): X is K, R or H for basic amino acids
  MISC_FEATURE (20)..(20): X is I, L or V
  MISC_FEATURE (21)..(21): X is I, L or V
  MISC_FEATURE (22)..(22): X is F, W or Y for aromatic amino acids
  MISC_FEATURE (23)..(23): X is F, W or Y for aromatic amino acids
  MISC_FEATURE (24)..(24): X is A and G
  MISC_FEATURE (25)..(25): X is D and E for acidic amino acids
  MISC_FEATURE (26)..(26): X is D and E for acidic amino acids
  MISC_FEATURE (27)..(27): X is I, L or V
  MISC_FEATURE (28)..(28): X is A and G
  MISC_FEATURE (29)..(29): X is C or S
  MISC_FEATURE (30)..(30): X is N or Q for amidated amino acids
  MISC_FEATURE (31)..(31): X is K, R or H for basic amino acids
  MISC_FEATURE (32)..(32): X is D and E for acidic amino acids
  MISC_FEATURE (33)..(33): X is I, L or V
  MISC_FEATURE (34)..(34): X is I, L or V
  MISC_FEATURE (35)..(35): X is K, R or H for basic amino acids
  MISC_FEATURE (36)..(36): X is N or Q for amidated amino acids
  MISC_FEATURE (37)..(37): X is A and G
  MISC_FEATURE (38)..(38): X is D and E for acidic amino acids
  MISC_FEATURE (39)..(39): X is K, R or H for basic amino acids
  MISC_FEATURE (40)..(40): X is I, L or V
  MISC_FEATURE (41)..(41): X is D and E for acidic amino acids
  MISC_FEATURE (42)..(42): X is K, R or H for basic amino acids
  MISC_FEATURE (43)..(43): X is I, L or V
  MISC_FEATURE (44)..(44): X is D and E for acidic amino acids

SEQ ID NO: 385 - protein, 46 aa, Artificial
  Completely synthesized peptide construct
DAEFRHDSGYEVHHQKLVFFAENVGSNKAIGGGDLLKNGERIEKVE

SEQ ID NO: 386 - protein, 46 aa, Artificial; identical to SEQ ID NO: 144
  peptide construct
  MISC_FEATURE (1)..(1): X is D and E for acidic amino acids
  MISC_FEATURE (2)..(2): X is A or G
  MISC_FEATURE (3)..(3): X is D and E for acidic amino acids
  MISC_FEATURE (4)..(4): X is F, W or Y for aromatic amino acids
  MISC_FEATURE (5)..(5): X is K, R or H for basic amino acids
  MISC_FEATURE (6)..(6): X is K, R or H for basic amino acids
  MISC_FEATURE (7)..(7): X is D and E for acidic amino acids
  MISC_FEATURE (8)..(8): X is T or S
  MISC_FEATURE (9)..(9): X is A or G
  MISC_FEATURE (10)..(10): X is F, W or Y for aromatic amino acids
  MISC_FEATURE (11)..(11): X is D and E for acidic amino acids
  MISC_FEATURE (12)..(12): X is I, L or V
  MISC_FEATURE (13)..(13): X is K, R or H for basic amino acids
  MISC_FEATURE (14)..(14): X is K, R or H for basic amino acids
  MISC_FEATURE (15)..(15): X is N or Q for amidated amino acids
  MISC_FEATURE (16)..(16): X is K,  R or H for basic amino acids
  MISC_FEATURE (17)..(17): X is I, L or V
  MISC_FEATURE (18)..(18): X is I, L or V
  MISC_FEATURE (19)..(19): X is F, W or Y for aromatic amino acids
  MISC_FEATURE (20)..(20): X is F, W or Y for aromatic amino acids
  MISC_FEATURE (21)..(21): X is A or G
  MISC_FEATURE (22)..(22): X is D and E for acidic amino acids
  MISC_FEATURE (23)..(23): X is D and E for acidic amino acids
  MISC_FEATURE (24)..(24): X is I, L or V
  MISC_FEATURE (25)..(25): X is A or G
  MISC_FEATURE (26)..(26): X is C or S
  MISC_FEATURE (27)..(27): X is N or Q for amidated amino acids
  MISC_FEATURE (28)..(28): X is K, R or H for basic amino acids
  MISC_FEATURE (29)..(29): X is A or G
  MISC_FEATURE (30)..(30): X is I, L or V
  MISC_FEATURE (31)..(31): X is A and G
  MISC_FEATURE (32)..(32): X is A and G
  MISC_FEATURE (33)..(33): X is A and G
  MISC_FEATURE (34)..(34): X is D and E for acidic amino acids
  MISC_FEATURE (35)..(35): X is I, L or V
  MISC_FEATURE (36)..(36): X is I, L or V
  MISC_FEATURE (37)..(37): X is K, R or H for basic amino acids
  MISC_FEATURE (38)..(38): X is N or Q for amidated amino acids
  MISC_FEATURE (39)..(39): X is A and G
  MISC_FEATURE (40)..(40): X is D and E for acidic amino acids
  MISC_FEATURE (41)..(41): X is K, R or H for basic amino acids
  MISC_FEATURE (42)..(42): X is I, L or V
  MISC_FEATURE (43)..(43): X is D and E for acidic amino acids
  MISC_FEATURE (44)..(44): X is K, R or H for basic amino acids
  MISC_FEATURE (45)..(45): X is I, L or V
  MISC_FEATURE (46)..(46): X is D and E for acidic amino acids

SEQ ID NO: 387 - protein, 27 aa, Artificial
  Completely synthesized peptide construct
DAEFRHDSGYEGGGDLLKNGERIEKVE

SEQ ID NO: 388 - protein, 27 aa, Artificial
  peptide construct
  MISC_FEATURE (1)..(1): X is D and E for acidic amino acids
  MISC_FEATURE (2)..(2): X is A or G
  MISC_FEATURE (3)..(3): X is D and E for acidic amino acids
  MISC_FEATURE (4)..(4): X is F, W or Y for aromatic amino acids
  MISC_FEATURE (5)..(5): X is K, R or H for basic amino acids
  MISC_FEATURE (6)..(6): X is K, R or H for basic amino acids
  MISC_FEATURE (7)..(7): X is D and E for acidic amino acids
  MISC_FEATURE (8)..(8): X is T or S
  MISC_FEATURE (9)..(9): X is A or G
  MISC_FEATURE (10)..(10): X is F, W or Y for aromatic amino acids
  MISC_FEATURE (11)..(11): X is D and E for acidic amino acids
  MISC_FEATURE (12)..(12): X is A and G
  MISC_FEATURE (13)..(13): X is A and G
  MISC_FEATURE (14)..(14): X is A and G
  MISC_FEATURE (15)..(15): X is D and E for acidic amino acids
  MISC_FEATURE (16)..(16): X is I, L or V
  MISC_FEATURE (17)..(17): X is I, L or V
  MISC_FEATURE (18)..(18): X is K, R or H for basic amino acids
  MISC_FEATURE (19)..(19): X is N or Q for amidated amino acids
  MISC_FEATURE (20)..(20): X is A and G
  MISC_FEATURE (21)..(21): X is D and E for acidic amino acids
  MISC_FEATURE (22)..(22): X is K, R or H for basic amino acids
  MISC_FEATURE (23)..(23): X is I, L or V
  MISC_FEATURE (24)..(24): X is D and E for acidic amino acids
  MISC_FEATURE (25)..(25): X is K, R or H for basic amino acids
  MISC_FEATURE (26)..(26): X is I, L or V
  MISC_FEATURE (27)..(27): X is D and E for acidic amino acids
XXXXXXXXXXXXXXXXXXXXXXXXXXX

SEQ ID NO: 389 - protein, 23 aa, Artificial
  Completely synthesized peptide construct
ENVGSNKGGGDLLKNGERIEKVE

SEQ ID NO: 390 - protein, 23 aa, Artificial
  peptide construct
  MISC_FEATURE (1)..(1): X is D and E for acidic amino acids
  MISC_FEATURE (2)..(2): X is D and E for acidic amino acids
  MISC_FEATURE (3)..(3): X is I, L or V
  MISC_FEATURE (4)..(4): X is A or G
  MISC_FEATURE (5)..(5): X is C or S
  MISC_FEATURE (6)..(6): X is N or Q for amidated amino acids
  MISC_FEATURE (7)..(7): X is K, R or H for basic amino acids
  MISC_FEATURE (8)..(8): X is A and G
  MISC_FEATURE (9)..(9): X is A and G
  MISC_FEATURE (10)..(10): X is A and G
  MISC_FEATURE (11)..(11): X is D and E for acidic amino acids
  MISC_FEATURE (12)..(12): X is I, L or V
  MISC_FEATURE (13)..(13): X is I, L or V
  MISC_FEATURE (14)..(14): X is K, R or H for basic amino acids
  MISC_FEATURE (15)..(15): X is N or Q for amidated amino acids
  MISC_FEATURE (16)..(16): X is A and G
  MISC_FEATURE (17)..(17): X is D and E for acidic amino acids
  MISC_FEATURE (18)..(18): X is K, R or H for basic amino acids
  MISC_FEATURE (19)..(19): X is I, L or V
  MISC_FEATURE (20)..(20): X is D and E for acidic amino acids
  MISC_FEATURE (21)..(21): X is K, R or H for basic amino acids
  MISC_FEATURE (22)..(22): X is I, L or V
  MISC_FEATURE (23)..(23): X is D and E for acidic amino acids
XXXXXXXXXXXXXXXXXXXXXXX

SEQ ID NO: 391 - protein, 28 aa, Artificial
  Completely synthesized peptide construct
DAEFRHDSGYEVGGGDLLKNGERIEKVE

SEQ ID NO: 392 - protein, 28 aa, Artificial
  peptide construct
  MISC_FEATURE (1)..(1): X is D and E for acidic amino acids
  MISC_FEATURE (2)..(2): X is A or G
  MISC_FEATURE (3)..(3): X is D and E for acidic amino acids
  MISC_FEATURE (4)..(4): X is F, W or Y for aromatic amino acids
  MISC_FEATURE (5)..(5): X is K, R or H for basic amino acids
  MISC_FEATURE (6)..(6): X is K, R or H for basic amino acids
  MISC_FEATURE (7)..(7): X is D and E for acidic amino acids
  MISC_FEATURE (8)..(8): X is T or S
  MISC_FEATURE (9)..(9): X is A or G
  MISC_FEATURE (10)..(10): X is F, W or Y for aromatic amino acids
  MISC_FEATURE (11)..(11): X is D and E for acidic amino acids
  MISC_FEATURE (12)..(12): X is I, L or V
  MISC_FEATURE (13)..(13): X is A and G
  MISC_FEATURE (14)..(14): X is A and G
  MISC_FEATURE (15)..(15): X is A and G
  MISC_FEATURE (16)..(16): X is D and E for acidic amino acids
  MISC_FEATURE (17)..(17): X is I, L or V
  MISC_FEATURE (18)..(18): X is I, L or V
  MISC_FEATURE (19)..(19): X is K, R or H for basic amino acids
  MISC_FEATURE (20)..(20): X is N or Q for amidated amino acids
  MISC_FEATURE (21)..(21): X is A and G
  MISC_FEATURE (22)..(22): X is D and E for acidic amino acids
  MISC_FEATURE (23)..(23): Xis K, R or H for basic amino acids
  MISC_FEATURE (24)..(24): X is I, L or V
  MISC_FEATURE (25)..(25): X is D and E for acidic amino acids
  MISC_FEATURE (26)..(26): X is K, R or H for basic amino acids
  MISC_FEATURE (27)..(27): X is I, L or V
  MISC_FEATURE (28)..(28): X is D and E for acidic amino acids
XXXXXXXXXXXXXXXXXXXXXXXXXXXX

SEQ ID NO: 393 - protein, 26 aa, Artificial
  Completely synthesized peptide construct
DAEFRHDSGYGGGDLLKNGERIEKVE

SEQ ID NO: 394 - protein, 26 aa, Artificial
  peptide construct
  MISC_FEATURE (1)..(1): X is D and E for acidic amino acids
  MISC_FEATURE (2)..(2): X is A or G
  MISC_FEATURE (3)..(3): X is D and E for acidic amino acids
  MISC_FEATURE (4)..(4): X is F, W or Y for aromatic amino acids
  MISC_FEATURE (5)..(5): X is K, R or H for basic amino acids
  MISC_FEATURE (6)..(6): X is K, R or H for basic amino acids
  MISC_FEATURE (7)..(7): X is D and E for acidic amino acids
  MISC_FEATURE (8)..(8): X is T or S
  MISC_FEATURE (9)..(9): X is A or G
  MISC_FEATURE (10)..(10): X is F,  W or Y for aromatic amino acids
  MISC_FEATURE (11)..(11): X is A and G
  MISC_FEATURE (12)..(12): X is A and G
  MISC_FEATURE (13)..(13): X is A and G
  MISC_FEATURE (14)..(14): X is D and E for acidic amino acids
  MISC_FEATURE (15)..(15): X is I, L or V
  MISC_FEATURE (16)..(16): X is I, L or V
  MISC_FEATURE (17)..(17): X is K, R or H for basic amino acids
  MISC_FEATURE (18)..(18): X is N or Q for amidated amino acids
  MISC_FEATURE (19)..(19): X is A and G
  MISC_FEATURE (20)..(20): X is D and E for acidic amino acids
  MISC_FEATURE (21)..(21): X is K, R or H for basic amino acids
  MISC_FEATURE (22)..(22): X is I, L or V
  MISC_FEATURE (23)..(23): X is D and E for acidic amino acids
  MISC_FEATURE (24)..(24): X is K, R or H for basic amino acids
  MISC_FEATURE (25)..(25): X is I, L or V
  MISC_FEATURE (26)..(26): X is D and E for acidic amino acids
XXXXXXXXXXXXXXXXXXXXXXXXXX

SEQ ID NO: 395 - protein, 20 aa, Artificial
  Completely synthesized peptide construct
EFRHGGGDLLKNGERIEKVE

SEQ ID NO: 396 - protein, 20 aa, Artificial
  peptide construct
  MISC_FEATURE (1)..(1): X is D and E for acidic amino acids
  MISC_FEATURE (2)..(2): X is F or P
  MISC_FEATURE (3)..(3): X is K, R or H for basic amino acids
  MISC_FEATURE (4)..(4): X is K, R or H for basic amino acids
  MISC_FEATURE (5)..(5): X is A and G
  MISC_FEATURE (6)..(6): X is A and G
  MISC_FEATURE (7)..(7): X is A and G
  MISC_FEATURE (8)..(8): X is D and E for acidic amino acids
  MISC_FEATURE (9)..(9): X is I, L or V
  MISC_FEATURE (10)..(10): X is I, L or V
  MISC_FEATURE (11)..(11): X is K, R or H for basic amino acids
  MISC_FEATURE (12)..(12): X is N or Q for amidated amino acids
  MISC_FEATURE (13)..(13): X is A and G
  MISC_FEATURE (14)..(14): X is D and E for acidic amino acids
  MISC_FEATURE (15)..(15): X is K, R or H for basic amino acids
  MISC_FEATURE (16)..(16): X is I, L or V
  MISC_FEATURE (17)..(17): X is D and E for acidic amino acids
  MISC_FEATURE (18)..(18): X is K, R or H for basic amino acids
  MISC_FEATURE (19)..(19): X is I, L or V
  MISC_FEATURE (20)..(20): X is D and E for acidic amino acids
XXXXXXXXXXXXXXXXXXXX

SEQ ID NO: 397 - protein, 35 aa, Artificial
  Completely synthesized peptide construct
DSAFDVLSFTAEEKAGVYKGGGDLLKNGERIEKVE

SEQ ID NO: 398 - protein, 35 aa, Artificial; identical to SEQ ID NO: 206
  peptide construct
  MISC_FEATURE (1)..(1): X is D and E for acidic amino acids
  MISC_FEATURE (2)..(2): X is C or S
  MISC_FEATURE (3)..(3): X is A or G
  MISC_FEATURE (4)..(4): X is F, W or Y for aromatic amino acids
  MISC_FEATURE (5)..(5): X is D and E for acidic amino acids
  MISC_FEATURE (6)..(6): X is I, L or V
  MISC_FEATURE (7)..(7): X is I, L or V
  MISC_FEATURE (8)..(8): X is C or S
  MISC_FEATURE (9)..(9): X is F, W or Y for aromatic amino acids
  MISC_FEATURE (10)..(10): X is T or S
  MISC_FEATURE (11)..(11): X is A or G
  MISC_FEATURE (12)..(12): X is D and E for acidic amino acids
  MISC_FEATURE (13)..(13): X is D and E for acidic amino acids
  MISC_FEATURE (14)..(14): X is K, R or H for basic amino acids
  MISC_FEATURE (15)..(15): X is A or G
  MISC_FEATURE (16)..(16): X is A or G
  MISC_FEATURE (17)..(17): X is I, L or V
  MISC_FEATURE (18)..(18): X is F, W or Y for aromatic amino acids
  MISC_FEATURE (19)..(19): X is K, R or H for basic amino acids
  MISC_FEATURE (20)..(20): X is A and G
  MISC_FEATURE (21)..(21): X is A and G
  MISC_FEATURE (22)..(22): X is A and G
  MISC_FEATURE (23)..(23): X is D and E for acidic amino acids
  MISC_FEATURE (24)..(24): X is I, L or V
  MISC_FEATURE (25)..(25): X is I, L or V
  MISC_FEATURE (26)..(26): X is K, R or H for basic amino acids
  MISC_FEATURE (27)..(27): X is N or Q for amidated amino acids
  MISC_FEATURE (28)..(28): X is A and G
  MISC_FEATURE (29)..(29): X is D and E for acidic amino acids
  MISC_FEATURE (30)..(30): X is K, R or H for basic amino acids
  MISC_FEATURE (31)..(31): X is I, L or V
  MISC_FEATURE (32)..(32): X is D and E for acidic amino acids
  MISC_FEATURE (33)..(33): X is K, R or H for basic amino acids
  MISC_FEATURE (34)..(34): X is I, L or V
  MISC_FEATURE (35)..(35): X is D and E for acidic amino acids

SEQ ID NO: 399 - protein, 30 aa, Artificial
  Completely synthesized peptide construct
SLKLMATLFSTYASGGGDLLKNGERIEKVE

SEQ ID NO: 400 - protein, 30 aa, Artificial; identical to SEQ ID NO: 58
  peptide construct
  MISC_FEATURE (1)..(1): X is C or S
  MISC_FEATURE (2)..(2): X is I, L or V
  MISC_FEATURE (3)..(3): X is K, R or H for basic amino acids
  MISC_FEATURE (4)..(4): X is I, L or V
  MISC_FEATURE (5)..(5): X is M or Nle
  MISC_FEATURE (6)..(6): X is A or G
  MISC_FEATURE (7)..(7): X is T or S
  MISC_FEATURE (8)..(8): X is I, L or V
  MISC_FEATURE (9)..(9): X is F or P
  MISC_FEATURE (10)..(10): X is C or S
  MISC_FEATURE (11)..(11): X is T or S
  MISC_FEATURE (12)..(12): X is F, W or Y for aromatic amino acids
  MISC_FEATURE (13)..(13): X is A or G
  MISC_FEATURE (14)..(14): X is C or S
  MISC_FEATURE (15)..(15): X is A and G
  MISC_FEATURE (16)..(16): X is A and G
  MISC_FEATURE (17)..(17): X is A and G
  MISC_FEATURE (18)..(18): X is D and E for acidic amino acids
  MISC_FEATURE (19)..(19): X is I, L or V
  MISC_FEATURE (20)..(20): X is I, L or V
  MISC_FEATURE (21)..(21): X is K, R or H for basic amino acids
  MISC_FEATURE (22)..(22): X is N or Q for amidated amino acids
  MISC_FEATURE (23)..(23): X is A and G
  MISC_FEATURE (24)..(24): X is D and E for acidic amino acids
  MISC_FEATURE (25)..(25): X is K, R or H for basic amino acids
  MISC_FEATURE (26)..(26): X is I, L or V
  MISC_FEATURE (27)..(27): X is D and E for acidic amino acids
  MISC_FEATURE (28)..(28): X is K, R or H for basic amino acids
  MISC_FEATURE (29)..(29): X is I, L or V
  MISC_FEATURE (30)..(30): X is D and E for acidic amino acids

SEQ ID NO: 401 - protein, 29 aa, Artificial
  Completely synthesized peptide construct
LKLMATLFSSYATGGGDLLKNGERIEKVE

SEQ ID NO: 402 - protein, 30 aa, Artificial; identical to SEQ ID NO: 58
  peptide construct
  MISC_FEATURE (1)..(1): X is C or S
  MISC_FEATURE (2)..(2): X is I, L or V
  MISC_FEATURE (3)..(3): X is K, R or  H for basic amino acids
  MISC_FEATURE (4)..(4): X is I, L or V
  MISC_FEATURE (5)..(5): X is M or Nle
  MISC_FEATURE (6)..(6): X is A or G
  MISC_FEATURE (7)..(7): X is T or S
  MISC_FEATURE (8)..(8): X is I, L or V
  MISC_FEATURE (9)..(9): X is F or P
  MISC_FEATURE (10)..(10): X is C or S
  MISC_FEATURE (11)..(11): X is C or S
  MISC_FEATURE (12)..(12): X is F, W or Y for aromatic amino acids
  MISC_FEATURE (13)..(13): X is A or G
  MISC_FEATURE (14)..(14): X is T or S
  MISC_FEATURE (15)..(15): X is A and G
  MISC_FEATURE (16)..(16): X is A and G
  MISC_FEATURE (17)..(17): X is A and G
  MISC_FEATURE (18)..(18): X is D and E for acidic amino acids
  MISC_FEATURE (19)..(19): X is I, L or V
  MISC_FEATURE (20)..(20): X is I, L or V
  MISC_FEATURE (21)..(21): X is K, R or H for basic amino acids
  MISC_FEATURE (22)..(22): X is N or Q for amidated amino acids
  MISC_FEATURE (23)..(23): X is A and G
  MISC_FEATURE (24)..(24): X is D and E for acidic amino acids
  MISC_FEATURE (25)..(25): X is K, R or H for basic amino acids
  MISC_FEATURE (26)..(26): X is I, L or V
  MISC_FEATURE (27)..(27): X is D and E for acidic amino acids
  MISC_FEATURE (28)..(28): X is K, R or H for basic amino acids
  MISC_FEATURE (29)..(29): X is I, L or V
  MISC_FEATURE (30)..(30): X is D and E for acidic amino acids

SEQ ID NO: 403 - protein, 27 aa, Artificial
  Completely synthesized peptide construct
NITEIADLTQKGGGDLLKNGERIEKVE

SEQ ID NO: 404 - protein, 27 aa, Artificial
  peptide construct
  MISC_FEATURE (1)..(1): X is N or Q for amidated amino acids
  MISC_FEATURE (2)..(2): X is I, L or V
  MISC_FEATURE (3)..(3): X is T or S
  MISC_FEATURE (4)..(4): X is D and E for acidic amino acids
  MISC_FEATURE (5)..(5): X is I, L or V
  MISC_FEATURE (6)..(6): X is A or G
  MISC_FEATURE (7)..(7): X is D and E for acidic amino acids
  MISC_FEATURE (8)..(8): X is I, L or V
  MISC_FEATURE (9)..(9): X is T or S
  MISC_FEATURE (10)..(10): X is N or Q for amidated amino acids
  MISC_FEATURE (11)..(11): X is K, R or H for basic amino acids
  MISC_FEATURE (12)..(12): X is A and G
  MISC_FEATURE (13)..(13): X is A and G
  MISC_FEATURE (14)..(14): X is A and G
  MISC_FEATURE (15)..(15): X is D and E for acidic amino acids
  MISC_FEATURE (16)..(16): X is I, L or V
  MISC_FEATURE (17)..(17): X is I, L or V
  MISC_FEATURE (18)..(18): X is K, R or H for basic amino acids
  MISC_FEATURE (19)..(19): X is N or Q for amidated amino acids
  MISC_FEATURE (20)..(20): X is A and G
  MISC_FEATURE (21)..(21): X is D and E for acidic amino acids
  MISC_FEATURE (22)..(22): X is K, R or H for basic amino acids
  MISC_FEATURE (23)..(23): X is I, L or V
  MISC_FEATURE (24)..(24): X is D and E for acidic amino acids
  MISC_FEATURE (25)..(25): X is K, R or H for basic amino acids
  MISC_FEATURE (26)..(26): X is I, L or V
  MISC_FEATURE (27)..(27): X is D and E for acidic amino acids
XXXXXXXXXXXXXXXXXXXXXXXXXXX

SEQ ID NO: 405 - protein, 56 aa, Artificial [sequence omitted]

SEQ ID NO: 406 - protein, 56 aa, Artificial; identical to SEQ ID NO: 302
  peptide construct
  MISC_FEATURE (1)..(1): X is N or Q for amidated amino acids
  MISC_FEATURE (2)..(2): X is M or Nle
  MISC_FEATURE (3)..(3): X is F, W or Y for aromatic amino acids
  MISC_FEATURE (4)..(4): X is A or G
  MISC_FEATURE (5)..(5): X is M or Nle
  MISC_FEATURE (6)..(6): X is M or Nle
  MISC_FEATURE (7)..(7): X is I, L or V
  MISC_FEATURE (8)..(8): X is A or G
  MISC_FEATURE (9)..(9): X is K, R or H for basic amino acids
  MISC_FEATURE (10)..(10): X is F, W or Y for aromatic amino acids
  MISC_FEATURE (11)..(11): X is K, R or H for basic amino acids
  MISC_FEATURE (12)..(12): X is M or Nle
  MISC_FEATURE (13)..(13): X is F, W or Y for aromatic amino acids
  MISC_FEATURE (14)..(14): X is F or P
  MISC_FEATURE (15)..(15): X is D and E for acidic amino acids
  MISC_FEATURE (16)..(16): X is I, L or V
  MISC_FEATURE (17)..(17): X is K, R or H for basic amino acids
  MISC_FEATURE (18)..(18): X is D and E for acidic amino acids
  MISC_FEATURE (19)..(19): X is K, R or H for basic amino acids
  MISC_FEATURE (20)..(20): X is A or G
  MISC_FEATURE (21)..(21): X is M or Nle
  MISC_FEATURE (22)..(22): X is A or G
  MISC_FEATURE (23)..(23): X is A or G
  MISC_FEATURE (24)..(24): X is I, L or V
  MISC_FEATURE (25)..(25): X is F or P
  MISC_FEATURE (26)..(26): X is K, R or H for basic amino acids
  MISC_FEATURE (27)..(27): X is I, L or V
  MISC_FEATURE (28)..(28): X is I, L or V
  MISC_FEATURE (29)..(29): X is A or G
  MISC_FEATURE (30)..(30): X is F, W or Y for aromatic amino acids
  MISC_FEATURE (31)..(31): X is T or S
  MISC_FEATURE (32)..(32): X is C or S
  MISC_FEATURE (33)..(33): X is D and E for acidic amino acids
  MISC_FEATURE (34)..(34): X is K, R or H for basic amino acids
  MISC_FEATURE (35)..(35): X is C or S
  MISC_FEATURE (36)..(36): X is K, R or H for basic amino acids
  MISC_FEATURE (37)..(37): X is F, W or Y for aromatic amino acids
  MISC_FEATURE (38)..(38): X is C or S
  MISC_FEATURE (39)..(39): X is I, L or V
  MISC_FEATURE (40)..(40): X is K, R or H for basic amino acids
  MISC_FEATURE (41)..(41): X is A and G
  MISC_FEATURE (42)..(42): X is A and G
  MISC_FEATURE (43)..(43): X is A and G
  MISC_FEATURE (44)..(44): X is D and E for acidic amino acids
  MISC_FEATURE (45)..(45): X is I, L or V
  MISC_FEATURE (46)..(46): X is I, L or V
  MISC_FEATURE (47)..(47): X is K, R or H for basic amino acids
  MISC_FEATURE (48)..(48): X is N or Q for amidated amino acids
  MISC_FEATURE (49)..(49): X is A and G
  MISC_FEATURE (50)..(50): X is D and E for acidic amino acids
  MISC_FEATURE (51)..(51): X is K, R or H for basic amino acids
  MISC_FEATURE (52)..(52): X is I, L or V
  MISC_FEATURE (53)..(53): X is D and  E for acidic amino acids
  MISC_FEATURE (54)..(54): X is K, R or H for basic amino acids
  MISC_FEATURE (55)..(55): X is I, L or V
  MISC_FEATURE (56)..(56): X is D and E for acidic amino acids

SEQ ID NO: 407 - protein, 50 aa, Artificial
  Completely synthesized peptide construct
IARFKMFPEVKEKGMAALPRLIAFTSEHSHFSLKGGGDLLKNGERIEKVE

SEQ ID NO: 408 - protein, 50 aa, Artificial; identical to SEQ ID NO: 328
  peptide construct
  MISC_FEATURE (1)..(1): X is I,  L or V
  MISC_FEATURE (2)..(2): X is A or G
  MISC_FEATURE (3)..(3): X is K, R or H for basic amino acids
  MISC_FEATURE (4)..(4): X is F, W or Y for aromatic amino acids
  MISC_FEATURE (5)..(5): X is K, R or H for basic amino acids
  MISC_FEATURE (6)..(6): X is M or Nle
  MISC_FEATURE (7)..(7): X is F, W or Y for aromatic amino acids
  MISC_FEATURE (8)..(8): X is F or P
  MISC_FEATURE (9)..(9): X is D and E for acidic amino acids
  MISC_FEATURE (10)..(10): X is I, L or V
  MISC_FEATURE (11)..(11): X is K, R or H for basic amino acids
  MISC_FEATURE (12)..(12): X is D and E for acidic amino acids
  MISC_FEATURE (13)..(13): X is K, R or H for basic amino acids
  MISC_FEATURE (14)..(14): X is A or G
  MISC_FEATURE (15)..(15): X is M or Nle
  MISC_FEATURE (16)..(16): X is A or G
  MISC_FEATURE (17)..(17): X is A or G
  MISC_FEATURE (18)..(18): X is I, L or V
  MISC_FEATURE (19)..(19): X is F or P
  MISC_FEATURE (20)..(20): X is K, R or H for basic amino acids
  MISC_FEATURE (21)..(21): X is I, L or V
  MISC_FEATURE (22)..(22): X is I, L or V
  MISC_FEATURE (23)..(23): X is A or G
  MISC_FEATURE (24)..(24): X is F, W or Y for aromatic amino acids
  MISC_FEATURE (25)..(25): X is T or S
  MISC_FEATURE (26)..(26): X is C or S
  MISC_FEATURE (27)..(27): X is D and E for acidic amino acids
  MISC_FEATURE (28)..(28): X is K, R or H for basic amino acids
  MISC_FEATURE (29)..(29): X is C or S
  MISC_FEATURE (30)..(30): X is K, R or H for basic amino acids
  MISC_FEATURE (31)..(31): X is F, W or Y for aromatic amino acids
  MISC_FEATURE (32)..(32): X is C or S
  MISC_FEATURE (33)..(33): X is I, L or V
  MISC_FEATURE (34)..(34): X is K, R or H for basic amino acids
  MISC_FEATURE (35)..(35): X is A and G
  MISC_FEATURE (36)..(36): X is A and G
  MISC_FEATURE (37)..(37): X is A and G
  MISC_FEATURE (38)..(38): X is D and E for acidic amino acids
  MISC_FEATURE (39)..(39): X is I, L or V
  MISC_FEATURE (40)..(40): X is I, L or V
  MISC_FEATURE (41)..(41): X is K, R or H for basic amino acids
  MISC_FEATURE (42)..(42): X is N or Q for amidated amino acids
  MISC_FEATURE (43)..(43): X is A and G
  MISC_FEATURE (44)..(44): X is D and E for acidic amino acids
  MISC_FEATURE (45)..(45): X is K, R or H for basic amino acids
  MISC_FEATURE (46)..(46): X is I, L or V
  MISC_FEATURE (47)..(47): X is D and E for acidic amino acids
  MISC_FEATURE (48)..(48): X is K, R or H for basic amino acids
  MISC_FEATURE (49)..(49): X is I, L or V
  MISC_FEATURE (50)..(50): X is D and E for acidic amino acids

SEQ ID NO: 409 - protein, 36 aa, Artificial
  Completely synthesized peptide construct
SRLSKVAPVIKARMMEYGTTGGGDLLKNGERIEKVE

SEQ ID NO: 410 - protein, 36 aa, Artificial; identical to SEQ ID NO: 172
  peptide construct
  MISC_FEATURE (1)..(1): X is C or S
  MISC_FEATURE (2)..(2): X is K, R or H for basic amino acids
  MISC_FEATURE (3)..(3): X is I, L or V
  MISC_FEATURE (4)..(4): X is C or S
  MISC_FEATURE (5)..(5): X is K, R or H for basic amino acids
  MISC_FEATURE (6)..(6): X is I, L or V
  MISC_FEATURE (7)..(7): X is A or G
  MISC_FEATURE (8)..(8): X is F or P
  MISC_FEATURE (9)..(9): X is I, L or V
  MISC_FEATURE (10)..(10): X is I, L or V
  MISC_FEATURE (11)..(11): X is K, R or H for basic amino acids
  MISC_FEATURE (12)..(12): X is A or G
  MISC_FEATURE (13)..(13): X is K, R or H for basic amino acids
  MISC_FEATURE (14)..(14): X is M or Nle
  MISC_FEATURE (15)..(15): X is M or Nle
  MISC_FEATURE (16)..(16): X is D and E for acidic amino acids
  MISC_FEATURE (17)..(17): X is F, W or Y for aromatic amino acids
  MISC_FEATURE (18)..(18): X is A or G
  MISC_FEATURE (19)..(19): X is T or S
  MISC_FEATURE (20)..(20): X is T or S
  MISC_FEATURE (21)..(21): X is A and G
  MISC_FEATURE (22)..(22): X is A and G
  MISC_FEATURE (23)..(23): X is A and G
  MISC_FEATURE (24)..(24): X is D and E for acidic amino acids
  MISC_FEATURE (25)..(25): X is I, L or V
  MISC_FEATURE (26)..(26): X is I, L or V
  MISC_FEATURE (27)..(27): X is K, R or H for basic amino acids
  MISC_FEATURE (28)..(28): X is N or Q for amidated amino acids
  MISC_FEATURE (29)..(29): X is A and G
  MISC_FEATURE (30)..(30): X is D and E for acidic amino acids
  MISC_FEATURE (31)..(31): X is K, R or H for basic amino acids
  MISC_FEATURE (32)..(32): X is I, L or V
  MISC_FEATURE (33)..(33): X is D and E for acidic amino acids
  MISC_FEATURE (34)..(34): X is K, R or H for basic amino acids
  MISC_FEATURE (35)..(35): X is I, L or V
  MISC_FEATURE (36)..(36): X is D and E for acidic amino acids

SEQ ID NO: 411 - protein, 35 aa, Artificial
  Completely synthesized peptide construct
IPPSLRYLEDEERMSRLSKGGGDLLKNGERIEKVE

SEQ ID NO: 412 - protein, 34 aa, Artificial; identical to SEQ ID NO: 79
  peptide construct
  MISC_FEATURE (1)..(1): X is I, L or V
  MISC_FEATURE (2)..(2): X is F or P
  MISC_FEATURE (3)..(3): X is F or P
  MISC_FEATURE (4)..(4): X is C or S
  MISC_FEATURE (5)..(5): X is I, L or V
  MISC_FEATURE (6)..(6): X is K, R or H for basic amino acids
  MISC_FEATURE (7)..(7): X is F, W or Y for aromatic amino acids
  MISC_FEATURE (8)..(8): X is D and E for acidic amino acids
  MISC_FEATURE (9)..(9): X is D and E for acidic amino acids
  MISC_FEATURE (10)..(10): X is D and E for acidic amino acids
  MISC_FEATURE (11)..(11): X is D and E for acidic amino acids
  MISC_FEATURE (12)..(12): X is K, R or H for basic amino acids
  MISC_FEATURE (13)..(13): X is M or Nle
  MISC_FEATURE (14)..(14): X is C or S
  MISC_FEATURE (15)..(15): X is K, R or H for basic amino acids
  MISC_FEATURE (16)..(16): X is I, L or V
  MISC_FEATURE (17)..(17): X is C or S
  MISC_FEATURE (18)..(18): X is K, R or H for basic amino acids
  MISC_FEATURE (19)..(19): X is A and G
  MISC_FEATURE (20)..(20): X is A and G
  MISC_FEATURE (21)..(21): X is A and G
  MISC_FEATURE (22)..(22): X is D and E for acidic amino acids
  MISC_FEATURE (23)..(23): X is I, L or V
  MISC_FEATURE (24)..(24): X is I, L or V
  MISC_FEATURE (25)..(25): X is K, R or H for basic amino acids
  MISC_FEATURE (26)..(26): X is N or Q for amidated amino acids
  MISC_FEATURE (27)..(27): X is A and G
  MISC_FEATURE (28)..(28): X is D and E for acidic amino acids
  MISC_FEATURE (29)..(29): X is K, R or H for basic amino acids
  MISC_FEATURE (30)..(30): X is I, L or V
  MISC_FEATURE (31)..(31): X is D and E for acidic amino acids
  MISC_FEATURE (32)..(32): X is K, R or H for basic amino acids
  MISC_FEATURE (33)..(33): X is I, L or V
  MISC_FEATURE (34)..(34): X is D and E for acidic amino acids

SEQ ID NO: 413 - protein, 36 aa, Artificial
  Completely synthesized peptide construct
NTNMFTYEIAPVFVLLEYVTGGGDLLKNGERIEKVE

SEQ ID NO: 414 - protein, 36 aa, Artificial; identical to SEQ ID NO: 172
  peptide construct
  MISC_FEATURE (1)..(1): X is N or Q for aromatic amino acids
  MISC_FEATURE (2)..(2): X is T or S
  MISC_FEATURE (3)..(3): X is N or Q for aromatic amino acids
  MISC_FEATURE (4)..(4): X is M or Nle
  MISC_FEATURE (5)..(5): X is F, W or Y for aromatic amino acids
  MISC_FEATURE (6)..(6): X is T or S
  MISC_FEATURE (7)..(7): X is F, W or  Y for aromatic amino acids
  MISC_FEATURE (8)..(8): X is D and E for acidic amino acids
  MISC_FEATURE (9)..(9): X is I, L or V
  MISC_FEATURE (10)..(10): X is A or G
  MISC_FEATURE (11)..(11): X is F or P
  MISC_FEATURE (12)..(12): X is I, L or V
  MISC_FEATURE (13)..(13): X is F, W or Y for aromatic amino acids
  MISC_FEATURE (14)..(14): X is I, L or V
  MISC_FEATURE (15)..(15): X is I, L or V
  MISC_FEATURE (16)..(16): X is I, L or V
  MISC_FEATURE (17)..(17): X is D and E for acidic amino acids
  MISC_FEATURE (18)..(18): X is F, W or Y for aromatic amino acids
  MISC_FEATURE (19)..(19): X is I, L or V
  MISC_FEATURE (20)..(20): X is T or S
  MISC_FEATURE (21)..(21): X is A and G
  MISC_FEATURE (22)..(22): X is A and G
  MISC_FEATURE (23)..(23): X is A and G
  MISC_FEATURE (24)..(24): X is D and E for acidic amino acids
  MISC_FEATURE (25)..(25): X is I, L or V
  MISC_FEATURE (26)..(26): X is I, L or V
  MISC_FEATURE (27)..(27): X is K, R or H for basic amino acids
  MISC_FEATURE (28)..(28): X is N or Q for amidated amino acids
  MISC_FEATURE (29)..(29): X is A and G
  MISC_FEATURE (30)..(30): X is D and E for acidic amino acids
  MISC_FEATURE (31)..(31): X is K, R or H for basic amino acids
  MISC_FEATURE (32)..(32): X is I, L or V
  MISC_FEATURE (33)..(33): X is D and E for acidic amino acids
  MISC_FEATURE (34)..(34): X is K, R or H for basic amino acids
  MISC_FEATURE (35)..(35): X is I, L or V
  MISC_FEATURE (36)..(36): X is D and E for acidic amino acids

SEQ ID NO: 415 - protein, 31 aa, Artificial
  Completely synthesized peptide construct
FKADEKKFWGKYLYEGGGDLLKNGERIEKVE

SEQ ID NO: 416 - protein, 31 aa, Artificial; identical to SEQ ID NO: 130
  peptide construct
  MISC_FEATURE (1)..(1): X is F, W or  Y for aromatic amino acids
  MISC_FEATURE (2)..(2): X is K, R or H for basic amino acids
  MISC_FEATURE (3)..(3): X is A or G
  MISC_FEATURE (4)..(4): X is D and E for acidic amino acids
  MISC_FEATURE (5)..(5): X is D and E for acidic amino acids
  MISC_FEATURE (6)..(6): X is K, R or H for basic amino acids
  MISC_FEATURE (7)..(7): X is K, R or H for basic amino acids
  MISC_FEATURE (8)..(8): X is F, W or Y for aromatic amino acids
  MISC_FEATURE (9)..(9): X is F, W or Y for aromatic amino acids
  MISC_FEATURE (10)..(10): X is A or G
  MISC_FEATURE (11)..(11): X is K, R or H for basic amino acids
  MISC_FEATURE (12)..(12): X is F, W or Y for aromatic amino acids
  MISC_FEATURE (13)..(13): X is I, L or V
  MISC_FEATURE (14)..(14): X is F, W or Y for aromatic amino acids
  MISC_FEATURE (15)..(15): X is D and E for acidic amino acids
  MISC_FEATURE (16)..(16): X is A and G
  MISC_FEATURE (17)..(17): X is A and G
  MISC_FEATURE (18)..(18): X is A and G
  MISC_FEATURE (19)..(19): X is D and E for acidic amino acids
  MISC_FEATURE (20)..(20): X is I, L or V
  MISC_FEATURE (21)..(21): X is I, L or V
  MISC_FEATURE (22)..(22): X is K, R or H for basic amino acids
  MISC_FEATURE (23)..(23): X is N or Q for amidated amino acids
  MISC_FEATURE (24)..(24): X is A and G
  MISC_FEATURE (25)..(25): X is D and E for acidic amino acids
  MISC_FEATURE (26)..(26): X is K, R or H for basic amino acids
  MISC_FEATURE (27)..(27): X is I, L or V
  MISC_FEATURE (28)..(28): X is D and E for acidic amino acids
  MISC_FEATURE (29)..(29): X is K, R or H for basic amino acids
  MISC_FEATURE (30)..(30): X is I, L or V
  MISC_FEATURE (31)..(31): X is D and E for acidic amino acids

SEQ ID NO: 417 - protein, 31 aa, Artificial
  Completely synthesized peptide construct
SHLVEALYLVCGERGGGGDLLKNGERIEKVE

SEQ ID NO: 418 - protein, 30 aa, Artificial; identical to SEQ ID NO: 58
  peptide construct
  MISC_FEATURE (1)..(1): X is C or S
  MISC_FEATURE (2)..(2): X is K, R or H for basic amino acids
  MISC_FEATURE (3)..(3): X is I, L or V
  MISC_FEATURE (4)..(4): X is I, L or V
  MISC_FEATURE (5)..(5): X is D and  E for acidic amino acids
  MISC_FEATURE (6)..(6): X is A or G
  MISC_FEATURE (7)..(7): X is I, L or V
  MISC_FEATURE (8)..(8): X is F, W or Y for aromatic amino acids
  MISC_FEATURE (9)..(9): X is I, L or V
  MISC_FEATURE (10)..(10): X is C or S
  MISC_FEATURE (11)..(11): X is A or G
  MISC_FEATURE (12)..(12): X is D and E for acidic amino acids
  MISC_FEATURE (13)..(13): X is K, R or H for basic amino acids
  MISC_FEATURE (14)..(14): X is A or G
  MISC_FEATURE (15)..(15): X is A and G
  MISC_FEATURE (16)..(16): X is A and G
  MISC_FEATURE (17)..(17): X is A and G
  MISC_FEATURE (18)..(18): X is D and E for acidic amino acids
  MISC_FEATURE (19)..(19): X is I, L or V
  MISC_FEATURE (20)..(20): X is I, L or V
  MISC_FEATURE (21)..(21): X is K, R or H for basic amino acids
  MISC_FEATURE (22)..(22): X is N or Q for amidated amino acids
  MISC_FEATURE (23)..(23): X is A and G
  MISC_FEATURE (24)..(24): X is D and E for acidic amino acids
  MISC_FEATURE (25)..(25): X is K, R or H for basic amino acids
  MISC_FEATURE (26)..(26): X is I, L or V
  MISC_FEATURE (27)..(27): X is D and E for acidic amino acids
  MISC_FEATURE (28)..(28): X is K, R or H for basic amino acids
  MISC_FEATURE (29)..(29): X is I, L or V
  MISC_FEATURE (30)..(30): X is D and E for acidic amino acids

SEQ ID NO: 419 - protein, 40 aa, Artificial
  Completely synthesized peptide construct
VLGGGCALLRCIPALDSLTPANEDGGGDLLKNGERIEKVE

SEQ ID NO: 420 - protein, 40 aa, Artificial; identical to SEQ ID NO: 54
  peptide construct
  MISC_FEATURE (1)..(1): X is I, L or V
  MISC_FEATURE (2)..(2): X is I, L or V
  MISC_FEATURE (3)..(3): X is A or G
  MISC_FEATURE (4)..(4): X is A or G
  MISC_FEATURE (5)..(5): X is A or G
  MISC_FEATURE (6)..(6): X is C or S
  MISC_FEATURE (7)..(7): X is A or G
  MISC_FEATURE (8)..(8): X is I, L or V
  MISC_FEATURE (9)..(9): X is I, L or V
  MISC_FEATURE (10)..(10): X is K, R or H for basic amino acids
  MISC_FEATURE (11)..(11): X is C or S
  MISC_FEATURE (12)..(12): X is I, L or V
  MISC_FEATURE (13)..(13): X is F or P
  MISC_FEATURE (14)..(14): X is A or G
  MISC_FEATURE (15)..(15): X is I, L or V
  MISC_FEATURE (16)..(16): X is D and E for acidic amino acids
  MISC_FEATURE (17)..(17): X is C or S
  MISC_FEATURE (18)..(18): X is I, L or V
  MISC_FEATURE (19)..(19): X is T or S
  MISC_FEATURE (20)..(20): X is F or P
  MISC_FEATURE (21)..(21): X is A or G
  MISC_FEATURE (22)..(22): X is N or Q for amidated amino acids
  MISC_FEATURE (23)..(23): X is D and E for acidic amino acids
  MISC_FEATURE (24)..(24): X is D and E for acidic amino acids
  MISC_FEATURE (25)..(25): X is A and G
  MISC_FEATURE (26)..(26): X is A and G
  MISC_FEATURE (27)..(27): X is A and G
  MISC_FEATURE (28)..(28): X is D and E for acidic amino acids
  MISC_FEATURE (29)..(29): X is I, L or V
  MISC_FEATURE (30)..(30): X is I, L or V
  MISC_FEATURE (31)..(31): X is K, R or H for basic amino acids
  MISC_FEATURE (32)..(32): X is N or Q for amidated amino acids
  MISC_FEATURE (33)..(33): X is A and G
  MISC_FEATURE (34)..(34): X is D and E for acidic amino acids
  MISC_FEATURE (35)..(35): X is K, R or H for basic amino acids
  MISC_FEATURE (36)..(36): X is I, L or V
  MISC_FEATURE (37)..(37): X is D and E for acidic amino acids
  MISC_FEATURE (38)..(38): X is K, R or H for basic amino acids
  MISC_FEATURE (39)..(39): X is I, L or V
  MISC_FEATURE (40)..(40): X is D and E for acidic amino acids

SEQ ID NO: 421 - protein, 44 aa, Artificial
  Completely synthesized peptide construct
EACVTSWLWSGEGAVFYRVDLHFINLGTGGGDLLKNGERIEKVE

SEQ ID NO: 422 - protein, 44 aa, Artificial; identical to SEQ ID NO: 304
  peptide construct
  MISC_FEATURE (1)..(1): X is D and E for acidic amino acids
  MISC_FEATURE (2)..(2): X is A or G
  MISC_FEATURE (3)..(3): X is C or S
  MISC_FEATURE (4)..(4): X is I, L or V
  MISC_FEATURE (5)..(5): X is T or S
  MISC_FEATURE (6)..(6): X is C or S
  MISC_FEATURE (7)..(7): X is F, W or Y for aromatic amino acids
  MISC_FEATURE (8)..(8): X is I, L or V
  MISC_FEATURE (9)..(9): X is F, W or Y for aromatic amino acids
  MISC_FEATURE (10)..(10): X is C or S
  MISC_FEATURE (11)..(11): X is A or G
  MISC_FEATURE (12)..(12): X is D and E for acidic amino acids
  MISC_FEATURE (13)..(13): X is A or G
  MISC_FEATURE (14)..(14): X is A or G
  MISC_FEATURE (15)..(15): X is I, L or V
  MISC_FEATURE (16)..(16): X is F, W or Y for aromatic amino acids
  MISC_FEATURE (17)..(17): X is F, W or Y for aromatic amino acids
  MISC_FEATURE (18)..(18): X is K, R or H for basic amino acids
  MISC_FEATURE (19)..(19): X is I, L or V
  MISC_FEATURE (20)..(20): X is D and E for acidic amino acids
  MISC_FEATURE (21)..(21): X is I, L or V
  MISC_FEATURE (22)..(22): X is K, R or H for basic amino acids
  MISC_FEATURE (23)..(23): X is F, W or Y for aromatic amino acids
  MISC_FEATURE (24)..(24): X is I, L or V
  MISC_FEATURE (25)..(25): X is N or Q for amidated amino acids
  MISC_FEATURE (26)..(26): X is I, L or V
  MISC_FEATURE (27)..(27): X is A or G
  MISC_FEATURE (28)..(28): X is T or S
  MISC_FEATURE (29)..(29): X is A and G
  MISC_FEATURE (30)..(30): X is A and G
  MISC_FEATURE (31)..(31): X is A and G
  MISC_FEATURE (32)..(32): X is D and E for acidic amino acids
  MISC_FEATURE (33)..(33): X is I, L or V
  MISC_FEATURE (34)..(34): X is I, L or V
  MISC_FEATURE (35)..(35): X is K, R or H for basic amino acids
  MISC_FEATURE (36)..(36): X is N or Q for amidated amino acids
  MISC_FEATURE (37)..(37): X is A and G
  MISC_FEATURE (38)..(38): X is D and  E for acidic amino acids
  MISC_FEATURE (39)..(39): X is K, R or H for basic amino acids
  MISC_FEATURE (40)..(40): X is I, L or V
  MISC_FEATURE (41)..(41): X is D and E for acidic amino acids
  MISC_FEATURE (42)..(42): X is K, R or H for basic amino acids
  MISC_FEATURE (43)..(43): X is I, L or V
  MISC_FEATURE (44)..(44): X is D and E for acidic amino acids

SEQ ID NO: 423 - protein, 37 aa, Artificial
  Completely synthesized peptide construct
MDFWCVEHDRPPPATPTSLTTGGGDLLKNGERIEKVE

SEQ ID NO: 424 - protein, 37 aa, Artificial; identical to SEQ ID NO: 158
  peptide construct
  MISC_FEATURE (1)..(1): X is M or Nle
  MISC_FEATURE (2)..(2): X is D and E for acidic amino acids
  MISC_FEATURE (3)..(3): X is F, W or Y for aromatic amino acids
  MISC_FEATURE (4)..(4): X is F, W or Y for aromatic amino acids
  MISC_FEATURE (5)..(5): X is C or S
  MISC_FEATURE (6)..(6): X is I, L or V
  MISC_FEATURE (7)..(7): X is D and E for acidic amino acids
  MISC_FEATURE (8)..(8): X is K, R or H for basic amino acids
  MISC_FEATURE (9)..(9): X is D and E for acidic amino acids
  MISC_FEATURE (10)..(10): X is K, R or H for basic amino acids
  MISC_FEATURE (11)..(11): X is F or P
  MISC_FEATURE (12)..(12): X is F or P
  MISC_FEATURE (13)..(13): X is F or P
  MISC_FEATURE (14)..(14): X is A or G
  MISC_FEATURE (15)..(15): X is T or S
  MISC_FEATURE (16)..(16): X is F or P
  MISC_FEATURE (17)..(17): X is T or S
  MISC_FEATURE (18)..(18): X is C or S
  MISC_FEATURE (19)..(19): X is I, L or V
  MISC_FEATURE (20)..(20): X is T or S
  MISC_FEATURE (21)..(21): X is T or S
  MISC_FEATURE (22)..(22): X is A and G
  MISC_FEATURE (23)..(23): X is A and G
  MISC_FEATURE (24)..(24): X is A and G
  MISC_FEATURE (25)..(25): X is D and E for acidic amino acids
  MISC_FEATURE (26)..(26): X is I, L or V
  MISC_FEATURE (27)..(27): X is I, L or V
  MISC_FEATURE (28)..(28): X is K, R or H for basic amino acids
  MISC_FEATURE (29)..(29): X is  N or Q for amidated amino acids
  MISC_FEATURE (30)..(30): X is A and G
  MISC_FEATURE (31)..(31): X is D and E for acidic amino acids
  MISC_FEATURE (32)..(32): X is K, R or H for basic amino acids
  MISC_FEATURE (33)..(33): X is I, L or V
  MISC_FEATURE (34)..(34): X is D and E for acidic amino acids
  MISC_FEATURE (35)..(35): X is K, R or H for basic amino acids
  MISC_FEATURE (36)..(36): X is I, L or V
  MISC_FEATURE (37)..(37): X is D and E for acidic amino acids

SEQ ID NO: 425 - protein, 36 aa, Artificial
  Completely synthesized peptide construct
NMYAMMIARFKMFPEVKEKGGGGDLLKNGERIEKVE

SEQ ID NO: 426 - protein, 36 aa, Artificial; identical to SEQ ID NO: 172
  peptide construct
  MISC_FEATURE (1)..(1): X is N or Q for amidated amino acids
  MISC_FEATURE (2)..(2): X is M or Nle
  MISC_FEATURE (3)..(3): X is F, W or Y for aromatic amino acids
  MISC_FEATURE (4)..(4): X is A or G
  MISC_FEATURE (5)..(5): X is M or Nle
  MISC_FEATURE (6)..(6): X is M or Nle
  MISC_FEATURE (7)..(7): X is I, L or V
  MISC_FEATURE (8)..(8): X is A or G
  MISC_FEATURE (9)..(9): X is K, R or H for basic amino acids
  MISC_FEATURE (10)..(10): X is F, W or Y for aromatic amino acids
  MISC_FEATURE (11)..(11): X is K,  R or H for basic amino acids
  MISC_FEATURE (12)..(12): X is M or Nle
  MISC_FEATURE (13)..(13): X is F, W or Y for aromatic amino acids
  MISC_FEATURE (14)..(14): X is F or P
  MISC_FEATURE (15)..(15): X is D and E for acidic amino acids
  MISC_FEATURE (16)..(16): X is I, L or V
  MISC_FEATURE (17)..(17): X is K, R or H for basic amino acids
  MISC_FEATURE (18)..(18): X is D and E for acidic amino acids
  MISC_FEATURE (19)..(19): X is K, R or H for basic amino acids
  MISC_FEATURE (20)..(20): X is A or G
  MISC_FEATURE (21)..(21): X is A and G
  MISC_FEATURE (22)..(22): X is A and G
  MISC_FEATURE (23)..(23): X is A and G
  MISC_FEATURE (24)..(24): X is D and E for acidic amino acids
  MISC_FEATURE (25)..(25): X is I, L or V
  MISC_FEATURE (26)..(26): X is I, L or V
  MISC_FEATURE (27)..(27): X is K, R or H for basic amino acids
  MISC_FEATURE (28)..(28): X is N or Q for amidated amino acids
  MISC_FEATURE (29)..(29): X is A and G
  MISC_FEATURE (30)..(30): X is D and E for acidic amino acids
  MISC_FEATURE (31)..(31): X is K, R or H for basic amino acids
  MISC_FEATURE (32)..(32): X is I, L or V
  MISC_FEATURE (33)..(33): X is D and E for acidic amino acids
  MISC_FEATURE (34)..(34): X is K, R or H for basic amino acids
  MISC_FEATURE (35)..(35): X is D and E for acidic amino acids
  MISC_FEATURE (36)..(36): X is I, L or V

SEQ ID NO: 427 - protein, 49 aa, Artificial
  Completely synthesized peptide construct
NMYAMMIARFKMFPEVKEKGMAALPRLIAFTSEGGGDLLKNGERIEKVE

SEQ ID NO: 428 - protein, 49 aa, Artificial; identical to SEQ ID NO: 348
  peptide construct
  MISC_FEATURE (1)..(1): X is N or Q for amidated amino acids
  MISC_FEATURE (2)..(2): X is M or Nle
  MISC_FEATURE (3)..(3): X is F, W or Y for aromatic amino acids
  MISC_FEATURE (4)..(4): X is A or G
  MISC_FEATURE (5)..(5): X is M or Nle
  MISC_FEATURE (6)..(6): X is M or Nle
  MISC_FEATURE (7)..(7): X is I, L or V
  MISC_FEATURE (8)..(8): X is A or G
  MISC_FEATURE (9)..(9): X is K, R or H for basic amino acids
  MISC_FEATURE (10)..(10): X is F, W or Y for aromatic amino acids
  MISC_FEATURE (11)..(11): X is K, R or H for basic amino acids
  MISC_FEATURE (12)..(12): X is M or Nle
  MISC_FEATURE (13)..(13): X is F, W or Y for aromatic amino acids
  MISC_FEATURE (14)..(14): X is F or P
  MISC_FEATURE (15)..(15): X is D and E for acidic amino acids
  MISC_FEATURE (16)..(16): X is I, L or V
  MISC_FEATURE (17)..(17): X is K, R or H for basic amino acids
  MISC_FEATURE (18)..(18): X is D and E for acidic amino acids
  MISC_FEATURE (19)..(19): X is K, R or H for basic amino acids
  MISC_FEATURE (20)..(20): X is A or G
  MISC_FEATURE (21)..(21): X is M or Nle
  MISC_FEATURE (22)..(22): X is A or G
  MISC_FEATURE (23)..(23): X is A or G
  MISC_FEATURE (24)..(24): X is I, L or V
  MISC_FEATURE (25)..(25): X is F or P
  MISC_FEATURE (26)..(26): X is K, R or H for basic amino acids
  MISC_FEATURE (27)..(27): X is I, L or V
  MISC_FEATURE (28)..(28): X is I, L or V
  MISC_FEATURE (29)..(29): X is A or G
  MISC_FEATURE (30)..(30): X is F, W or Y for aromatic amino acids
  MISC_FEATURE (31)..(31): X is T or S
  MISC_FEATURE (32)..(32): X is C or S
  MISC_FEATURE (33)..(33): X is D and E for acidic amino acids
  MISC_FEATURE (34)..(34): X is A and G
  MISC_FEATURE (35)..(35): X is A and G
  MISC_FEATURE (36)..(36): X is A and G
  MISC_FEATURE (37)..(37): X is D and E for acidic amino acids
  MISC_FEATURE (38)..(38): X is I, L or V
  MISC_FEATURE (39)..(39): X is I, L or V
  MISC_FEATURE (40)..(40): X is K, R or H for basic amino acids
  MISC_FEATURE (41)..(41): X is N or Q for amidated amino acids
  MISC_FEATURE (42)..(42): X is A and G
  MISC_FEATURE (43)..(43): X is D and E for acidic amino acids
  MISC_FEATURE (44)..(44): X is K, R or H for basic amino acids
  MISC_FEATURE (45)..(45): X is I, L or V
  MISC_FEATURE (46)..(46): X is D and E for acidic amino acids
  MISC_FEATURE (47)..(47): X is K, R or H for basic amino acids
  MISC_FEATURE (48)..(48): X is I, L or V
  MISC_FEATURE (49)..(49): X is D and E for acidic amino acids

SEQ ID NO: 429 - protein, 29 aa, Artificial
  Completely synthesized peptide construct
IAFTSEHSHFSLKGGGDLLKNGERIEKVE

SEQ ID NO: 430 - protein, 29 aa, Artificial
  peptide construct
  MISC_FEATURE (1)..(1): X is I, L or V
  MISC_FEATURE (2)..(2): X is A or G
  MISC_FEATURE (3)..(3): X is F, W or Y for aromatic amino acids
  MISC_FEATURE (4)..(4): X is T or S
  MISC_FEATURE (5)..(5): X is C or S
  MISC_FEATURE (6)..(6): X is D and E for acidic amino acids
  MISC_FEATURE (7)..(7): X is K, R or H for basic amino acids
  MISC_FEATURE (8)..(8): X is C or S
  MISC_FEATURE (9)..(9): X is K, R or H for basic amino acids
  MISC_FEATURE (10)..(10): X is F, W or Y for aromatic amino acids
  MISC_FEATURE (11)..(11): X is C or S
  MISC_FEATURE (12)..(12): X is I, L or V
  MISC_FEATURE (13)..(13): X is K, R or H for basic amino acids
  MISC_FEATURE (14)..(14): X is A and G
  MISC_FEATURE (15)..(15): X is A and G
  MISC_FEATURE (16)..(16): X is A and G
  MISC_FEATURE (17)..(17): X is D and E for acidic amino acids
  MISC_FEATURE (18)..(18): X is I, L or V
  MISC_FEATURE (19)..(19): X is I, L or V
  MISC_FEATURE (20)..(20): X is K, R or H for basic amino acids
  MISC_FEATURE (21)..(21): X is N or Q for amidated amino acids
  MISC_FEATURE (22)..(22): X is A and G
  MISC_FEATURE (23)..(23): X is D and E for acidic amino acids
  MISC_FEATURE (24)..(24): X is K, R or H for basic amino acids
  MISC_FEATURE (25)..(25): X is I, L or V
  MISC_FEATURE (26)..(26): X is D and E for acidic amino acids
  MISC_FEATURE (27)..(27): X is K, R or H for basic amino acids
  MISC_FEATURE (28)..(28): X is I, L or V
  MISC_FEATURE (29)..(29): X is D and E for acidic amino acids
XXXXXXXXXXXXXXXXXXXXXXXXXXXXX

SEQ ID NO: 431 - protein, 37 aa, Artificial; identical to SEQ ID NO: 423
  Completely synthesized peptide construct

SEQ ID NO: 432 - protein, 37 aa, Artificial; identical to SEQ ID NO: 158
  peptide construct
  MISC_FEATURE (1)..(1): X is M or Nle
  MISC_FEATURE (2)..(2): X is D and E for acidic amino acids
  MISC_FEATURE (3)..(3): X is F, W or Y for aromatic amino acids
  MISC_FEATURE (4)..(4): X is F, W or Y for aromatic amino acids
  MISC_FEATURE (5)..(5): X is C or S
  MISC_FEATURE (6)..(6): X is I, L or V
  MISC_FEATURE (7)..(7): X is D and E for acidic amino acids
  MISC_FEATURE (8)..(8): X is K, R or H for basic amino acids
  MISC_FEATURE (9)..(9): X is D and E for acidic amino acids
  MISC_FEATURE (10)..(10): X is K, R or H for basic amino acids
  MISC_FEATURE (11)..(11): X is F or P
  MISC_FEATURE (12)..(12): X is F or P
  MISC_FEATURE (13)..(13): X is F or P
  MISC_FEATURE (14)..(14): X is A or G
  MISC_FEATURE (15)..(15): X is T or S
  MISC_FEATURE (16)..(16): X is F or P
  MISC_FEATURE (17)..(17): X is T or S
  MISC_FEATURE (18)..(18): X is C or S
  MISC_FEATURE (19)..(19): X is I, L or V
  MISC_FEATURE (20)..(20): X is T or S
  MISC_FEATURE (21)..(21): X is T or S
  MISC_FEATURE (22)..(22): X  is A and G
  MISC_FEATURE (23)..(23): X is A and G
  MISC_FEATURE (24)..(24): X is A and G
  MISC_FEATURE (25)..(25): X is D and E for acidic amino acids
  MISC_FEATURE (26)..(26): X is I, L or V
  MISC_FEATURE (27)..(27): X is  I, L or V
  MISC_FEATURE (28)..(28): X is K, R or H for basic amino acids
  MISC_FEATURE (29)..(29): X is N or Q for amidated amino acids
  MISC_FEATURE (30)..(30): X is A and G
  MISC_FEATURE (31)..(31): X is D and E for acidic amino acids
  MISC_FEATURE (32)..(32): X is K, R or H for basic amino acids
  MISC_FEATURE (33)..(33): X is I, L or V
  MISC_FEATURE (34)..(34): X is D and E for acidic amino acids
  MISC_FEATURE (35)..(35): X is K, R or H for basic amino acids
  MISC_FEATURE (36)..(36): X is I, L or V
  MISC_FEATURE (37)..(37): X is D and E for acidic amino acids

SEQ ID NO: 433 - protein, 26 aa, Artificial
  Completely synthesized peptide construct
ERPTLAFLQDGGGDLLKNGERIEKVE

SEQ ID NO: 434 - protein, 26 aa, Artificial
  peptide construct
  MISC_FEATURE (1)..(1): X is D and E for acidic amino acids
  MISC_FEATURE (2)..(2): X is K, R or H for basic amino acids
  MISC_FEATURE (3)..(3): X is F or P
  MISC_FEATURE (4)..(4): X is T or S
  MISC_FEATURE (5)..(5): X is I, L or V
  MISC_FEATURE (6)..(6): X is A or G
  MISC_FEATURE (7)..(7): X is F, W or Y for aromatic amino acids
  MISC_FEATURE (8)..(8): X is I, L or V
  MISC_FEATURE (9)..(9): X is N or Q for amidated amino acids
  MISC_FEATURE (10)..(10): X is D and E for acidic amino acids
  MISC_FEATURE (11)..(11): X is A and G
  MISC_FEATURE (12)..(12): X is A and G
  MISC_FEATURE (13)..(13): X is A and G
  MISC_FEATURE (14)..(14): X is D and E for acidic amino acids
  MISC_FEATURE (15)..(15): X is I, L or V
  MISC_FEATURE (16)..(16): X is I, L or V
  MISC_FEATURE (17)..(17): X is K, R or H for basic amino acids
  MISC_FEATURE (18)..(18): X is N or Q for amidated amino acids
  MISC_FEATURE (19)..(19): X is A and G
  MISC_FEATURE (20)..(20): X is D and E for acidic amino acids
  MISC_FEATURE (21)..(21): X is K, R or H for basic amino acids
  MISC_FEATURE (22)..(22): X is I, L or V
  MISC_FEATURE (23)..(23): X is D and E for acidic amino acids
  MISC_FEATURE (24)..(24): X is K, R or H for basic amino acids
  MISC_FEATURE (25)..(25): X is I, L or V
  MISC_FEATURE (26)..(26): X is D and E for acidic amino acids
XXXXXXXXXXXXXXXXXXXXXXXXXX

SEQ ID NO: 435 - protein, 26 aa, Artificial
  Completely synthesized peptide construct
DRSTKVIDFHGGGDLLKNGERIEKVE

SEQ ID NO: 436 - protein, 26 aa, Artificial
  peptide construct
  MISC_FEATURE (1)..(1): X is D and E for acidic amino acids
  MISC_FEATURE (2)..(2): X is K, R or H for basic amino acids
  MISC_FEATURE (3)..(3): X is C or S
  MISC_FEATURE (4)..(4): X is T or S
  MISC_FEATURE (5)..(5): X is K, R or H for basic amino acids
  MISC_FEATURE (6)..(6): X is I, L or V
  MISC_FEATURE (7)..(7): X is I, L or V
  MISC_FEATURE (8)..(8): X is D and E for acidic amino acids
  MISC_FEATURE (9)..(9): X is F, W or Y for aromatic amino acids
  MISC_FEATURE (10)..(10): X is K, R or H for basic amino acids
  MISC_FEATURE (11)..(11): X is A and G
  MISC_FEATURE (12)..(12): X is A and G
  MISC_FEATURE (13)..(13): X is A and G
  MISC_FEATURE (14)..(14): X is D and E for acidic amino acids
  MISC_FEATURE (15)..(15): X is I, L or V
  MISC_FEATURE (16)..(16): X is I, L or V
  MISC_FEATURE (17)..(17): X is K, R or H for basic amino acids
  MISC_FEATURE (18)..(18): X is N or Q for amidated amino acids
  MISC_FEATURE (19)..(19): X is A and G
  MISC_FEATURE (20)..(20): X is D and E for acidic amino acids
  MISC_FEATURE (21)..(21): X is K, R or H for basic amino acids
  MISC_FEATURE (22)..(22): X is I, L or V
  MISC_FEATURE (23)..(23): X is D and E for acidic amino acids
  MISC_FEATURE (24)..(24): X is K, R or H for basic amino acids
  MISC_FEATURE (25)..(25): X is I, L or V
  MISC_FEATURE (26)..(26): X is D and E for acidic amino acids
XXXXXXXXXXXXXXXXXXXXXXXXXX

SEQ ID NO: 437 - protein, 29 aa, Artificial
  Completely synthesized peptide construct
IAGFKGEQGPKGEGGGDLLKNGERIEKVE

SEQ ID NO: 438 - protein, 29 aa, Artificial
  peptide construct
  MISC_FEATURE (1)..(1): X is I, L or V
  MISC_FEATURE (2)..(2): X is  A or G
  MISC_FEATURE (3)..(3): X is  A or G
  MISC_FEATURE (4)..(4): X is F, W or Y for aromatic amino acids
  MISC_FEATURE (5)..(5): X is K, R or H for basic amino acids
  MISC_FEATURE (6)..(6): X is A or G
  MISC_FEATURE (7)..(7): X is D and E for acidic amino acids
  MISC_FEATURE (8)..(8): X is N or Q for amidated amino acids
  MISC_FEATURE (9)..(9): X is A or G
  MISC_FEATURE (10)..(10): X is F or P
  MISC_FEATURE (11)..(11): X is K, R or H for basic amino acids
  MISC_FEATURE (12)..(12): X is A or G
  MISC_FEATURE (13)..(13): X is D and E for acidic amino acids
  MISC_FEATURE (14)..(14): X is A and G
  MISC_FEATURE (15)..(15): X is A and G
  MISC_FEATURE (16)..(16): X is A and G
  MISC_FEATURE (17)..(17): X is D and E for acidic amino acids
  MISC_FEATURE (18)..(18): X is I, L or V
  MISC_FEATURE (19)..(19): X is I, L or V
  MISC_FEATURE (20)..(20): X is K, R or H for basic amino acids
  MISC_FEATURE (21)..(21): X is N or Q for amidated amino acids
  MISC_FEATURE (22)..(22): X is A and G
  MISC_FEATURE (23)..(23): X is D and E for acidic amino acids
  MISC_FEATURE (24)..(24): X is K, R or H for basic amino acids
  MISC_FEATURE (25)..(25): X is I, L or V
  MISC_FEATURE (26)..(26): X is D and E for acidic amino acids
  MISC_FEATURE (27)..(27): X is K, R or H for basic amino acids
  MISC_FEATURE (28)..(28): X is I, L or V
  MISC_FEATURE (29)..(29): X is D and E for acidic amino acids
XXXXXXXXXXXXXXXXXXXXXXXXXXXXX

SEQ ID NO: 439 - protein, 16 aa, Artificial
  Completely synthesized peptide construct
GGGDLLKNGERIEKVE

SEQ ID NO: 440 - protein, 16 aa, Artificial
  peptide construct
  MISC_FEATURE (1)..(1): X is A and G
  MISC_FEATURE (2)..(2): X is A and G
  MISC_FEATURE (3)..(3): X is A and G
  MISC_FEATURE (4)..(4): X is D and E for acidic amino acids
  MISC_FEATURE (5)..(5): X is I, L or V
  MISC_FEATURE (6)..(6): X is I, L or V
  MISC_FEATURE (7)..(7): X is K, R or H for basic amino acids
  MISC_FEATURE (8)..(8): X is N or Q for amidated amino acids
  MISC_FEATURE (9)..(9): X is A and G
  MISC_FEATURE (10)..(10): X is D and E for acidic amino acids
  MISC_FEATURE (11)..(11): X is K, R or H for basic amino acids
  MISC_FEATURE (12)..(12): X is I, L or V
  MISC_FEATURE (13)..(13): X is D and E for acidic amino acids
  MISC_FEATURE (14)..(14): X is K, R or H for basic amino acids
  MISC_FEATURE (15)..(15): X is I, L or V
  MISC_FEATURE (16)..(16): X is D and E for acidic amino acids
XXXXXXXXXXXXXXXX

SEQ ID NO: 441 - protein, 24 aa, Artificial
  Completely synthesized peptide construct
KNIVTPRTGGGDLLKNGERIEKVE

SEQ ID NO: 442 - protein, 24 aa, Artificial
  peptide construct
  MISC_FEATURE (1)..(1): X is K, R or H for basic amino acids
  MISC_FEATURE (2)..(2): X is N or Q for amidated amino acids
  MISC_FEATURE (3)..(3): X is I, L or V
  MISC_FEATURE (4)..(4): X is I, L or V
  MISC_FEATURE (5)..(5): X is T or S
  MISC_FEATURE (6)..(6): X is F or P
  MISC_FEATURE (7)..(7): X is K, R or H for basic amino acids
  MISC_FEATURE (8)..(8): X is T or S
  MISC_FEATURE (9)..(9): X is A and G
  MISC_FEATURE (10)..(10): X is A and G
  MISC_FEATURE (11)..(11): X is A and G
  MISC_FEATURE (12)..(12): X is D and E for acidic amino acids
  MISC_FEATURE (13)..(13): X is I, L or V
  MISC_FEATURE (14)..(14): X is I, L or V
  MISC_FEATURE (15)..(15): X is K, R or H for basic amino acids
  MISC_FEATURE (16)..(16): X is N or Q for amidated amino acids
  MISC_FEATURE (17)..(17): X is A and G
  MISC_FEATURE (18)..(18): X is D and E for acidic amino acids
  MISC_FEATURE (19)..(19): X is K, R or H for basic amino acids
  MISC_FEATURE (20)..(20): X is I, L or V
  MISC_FEATURE (21)..(21): X is D and E for acidic amino acids
  MISC_FEATURE (22)..(22): X is K, R or H for basic amino acids
  MISC_FEATURE (23)..(23): X is I, L or V
  MISC_FEATURE (24)..(24): X is D and E for acidic amino acids
XXXXXXXXXXXXXXXXXXXXXXXX

SEQ ID NO: 443 - protein, 31 aa, Artificial
  Completely synthesized peptide construct
GDKVSFFCKNKEKKCGGGDLLKNGERIEKVE

SEQ ID NO: 444 - protein, 31 aa, Artificial; identical to SEQ ID NO: 130
  peptide construct
  MISC_FEATURE (1)..(1): X is A or G
  MISC_FEATURE (2)..(2): X is D and E for acidic amino acids
  MISC_FEATURE (3)..(3): X is K, R or H for basic amino acids
  MISC_FEATURE (4)..(4): X is I, L or V
  MISC_FEATURE (5)..(5): X is C or S
  MISC_FEATURE (6)..(6): X is F, W or Y for aromatic amino acids
  MISC_FEATURE (7)..(7): X is F, W or Y for aromatic amino acids
  MISC_FEATURE (8)..(8): X is C or S
  MISC_FEATURE (9)..(9): X is K, R or H for basic amino acids
  MISC_FEATURE (10)..(10): X is N or Q for amidated amino acids
  MISC_FEATURE (11)..(11): X is K, R or H for basic amino acids
  MISC_FEATURE (12)..(12): X is D and E for acidic amino acids
  MISC_FEATURE (13)..(13): X is K, R or H for basic amino acids
  MISC_FEATURE (14)..(14): X is K, R or H for basic amino acids
  MISC_FEATURE (15)..(15): X is C or S
  MISC_FEATURE (16)..(16): X is A and G
  MISC_FEATURE (17)..(17): X is A and G
  MISC_FEATURE (18)..(18): X is A and G
  MISC_FEATURE (19)..(19): X is D and E for acidic amino acids
  MISC_FEATURE (20)..(20): X is I, L or V
  MISC_FEATURE (21)..(21): X is I, L or V
  MISC_FEATURE (22)..(22): X is K, R or H for basic amino acids
  MISC_FEATURE (23)..(23): X is N or Q for amidated amino acids
  MISC_FEATURE (24)..(24): X is A and G
  MISC_FEATURE (25)..(25): X is D and E for acidic amino acids
  MISC_FEATURE (26)..(26): X is K, R or H for basic amino acids
  MISC_FEATURE (27)..(27): X is I, L or V
  MISC_FEATURE (28)..(28): X is D and E for acidic amino acids
  MISC_FEATURE (29)..(29): X is K, R or H for basic amino acids
  MISC_FEATURE (30)..(30): X is I, L or V
  MISC_FEATURE (31)..(31): X is D and E for acidic amino acids

SEQ ID NO: 445 - protein, 33 aa, Artificial
  Completely synthesized peptide construct
EIIVTHFPFDEQNCSMKGGGDLLKNGERIEKVE

SEQ ID NO: 446 - protein, 33 aa, Artificial; identical to SEQ ID NO: 99
  peptide construct
  MISC_FEATURE (1)..(1): X is D and E for acidic amino acids
  MISC_FEATURE (2)..(2): X is I, L or V
  MISC_FEATURE (3)..(3): X is I, L or V
  MISC_FEATURE (4)..(4): X is I, L or V
  MISC_FEATURE (5)..(5): X is T or S
  MISC_FEATURE (6)..(6): X is K, R or H for basic amino acids
  MISC_FEATURE (7)..(7): X is F, W or Y for aromatic amino acids
  MISC_FEATURE (8)..(8): X is F or P
  MISC_FEATURE (9)..(9): X is F, W or Y for aromatic amino acids
  MISC_FEATURE (10)..(10): X is D and E for acidic amino acids
  MISC_FEATURE (11)..(11): X is D and E for acidic amino acids
  MISC_FEATURE (12)..(12): X is N or Q for amidated amino acids
  MISC_FEATURE (13)..(13): X is N or Q for amidated amino acids
  MISC_FEATURE (14)..(14): X is C or S
  MISC_FEATURE (15)..(15): X is C or S
  MISC_FEATURE (16)..(16): X is M or Nle
  MISC_FEATURE (17)..(17): X is K, R or H for basic amino acids
  MISC_FEATURE (18)..(18): X  is A and G
  MISC_FEATURE (19)..(19): X is A and G
  MISC_FEATURE (20)..(20): X is A and G
  MISC_FEATURE (21)..(21): X is D and E for acidic amino acids
  MISC_FEATURE (22)..(22): X is I, L or V
  MISC_FEATURE (23)..(23): X is I, L or V
  MISC_FEATURE (24)..(24): X is K, R or H for basic amino acids
  MISC_FEATURE (25)..(25): X is N or Q for amidated amino acids
  MISC_FEATURE (26)..(26): X is A and G
  MISC_FEATURE (27)..(27): X is D and E for acidic amino acids
  MISC_FEATURE (28)..(28): X is K, R or H for basic amino acids
  MISC_FEATURE (29)..(29): X is I, L or V
  MISC_FEATURE (30)..(30): X is D and E for acidic amino acids
  MISC_FEATURE (31)..(31): X is K, R or H for basic amino acids
  MISC_FEATURE (32)..(32): X is I, L or V
  MISC_FEATURE (33)..(33): X is D and E for acidic amino acids

SEQ ID NO: 447 - protein, 29 aa, Artificial
  Completely synthesized peptide construct
VHFFKNIVTPRTPGGGDLLKNGERIEKVE

SEQ ID NO: 448 - protein, 29 aa, Artificial
  peptide construct
  MISC_FEATURE (1)..(1): X is I, L or V
  MISC_FEATURE (2)..(2): X is K, R or H for basic amino acids
  MISC_FEATURE (3)..(3): X is F, W or Y for aromatic amino acids
  MISC_FEATURE (4)..(4): X is F, W or Y for aromatic amino acids
  MISC_FEATURE (5)..(5): X is K, R or H for basic amino acids
  MISC_FEATURE (6)..(6): X is N or Q for amidated amino acids
  MISC_FEATURE (7)..(7): X is I, L or V
  MISC_FEATURE (8)..(8): X is I, L or V
  MISC_FEATURE (9)..(9): X is T or S
  MISC_FEATURE (10)..(10): X is F or P
  MISC_FEATURE (11)..(11): X is K, R or H for basic amino acids
  MISC_FEATURE (12)..(12): X is T or S
  MISC_FEATURE (13)..(13): X is F or P
  MISC_FEATURE (14)..(14): X is A and G
  MISC_FEATURE (15)..(15): X is A and G
  MISC_FEATURE (16)..(16): X is A and G
  MISC_FEATURE (17)..(17): X is D and E for acidic amino acids
  MISC_FEATURE (18)..(18): X is I, L or V
  MISC_FEATURE (19)..(19): X is I, L or V
  MISC_FEATURE (20)..(20): X is K, R or H for basic amino acids
  MISC_FEATURE (21)..(21): X is N or Q for amidated amino acids
  MISC_FEATURE (22)..(22): X is A and G
  MISC_FEATURE (23)..(23): X is D and E for acidic amino acids
  MISC_FEATURE (24)..(24): X is K, R or H for basic amino acids
  MISC_FEATURE (25)..(25): X is I, L or V
  MISC_FEATURE (26)..(26): X is D and E for acidic amino acids
  MISC_FEATURE (27)..(27): X is K, R or H for basic amino acids
  MISC_FEATURE (28)..(28): X is I, L or V
  MISC_FEATURE (29)..(29): X is D and E for acidic amino acids
XXXXXXXXXXXXXXXXXXXXXXXXXXXXX

SEQ ID NO: 449 - protein, 33 aa, Artificial
  Completely synthesized peptide construct
YQQLNSERGVPNENIENGGGDLLKNGERIEKVE

SEQ ID NO: 450 - protein, 33 aa, Artificial; identical to SEQ ID NO: 99
  peptide construct
  MISC_FEATURE (1)..(1): X is F, W or Y for aromatic amino acids
  MISC_FEATURE (2)..(2): X is N or Q for amidated amino acids
  MISC_FEATURE (3)..(3): X is N or Q for amidated amino acids
  MISC_FEATURE (4)..(4): X is I, L or V
  MISC_FEATURE (5)..(5): X is N or Q for amidated amino acids
  MISC_FEATURE (6)..(6): X is C or S
  MISC_FEATURE (7)..(7): X is D and E for acidic amino acids
  MISC_FEATURE (8)..(8): X is K, R or H for basic amino acids
  MISC_FEATURE (9)..(9): X is A or G
  MISC_FEATURE (10)..(10): X is I, L or V
  MISC_FEATURE (11)..(11): X is F or P
  MISC_FEATURE (12)..(12): X is N or Q for amidated amino acids
  MISC_FEATURE (13)..(13): X is D and E for acidic amino acids
  MISC_FEATURE (14)..(14): X is N or Q for amidated amino acids
  MISC_FEATURE (15)..(15): X is I, L or V
  MISC_FEATURE (16)..(16): X is D and E for acidic amino acids
  MISC_FEATURE (17)..(17): X is N or Q for amidated amino acids
  MISC_FEATURE (18)..(18): X is A and G
  MISC_FEATURE (19)..(19): X is A and G
  MISC_FEATURE (20)..(20): X is A and G
  MISC_FEATURE (21)..(21): X is D and E for acidic amino acids
  MISC_FEATURE (22)..(22): X is I, L or V
  MISC_FEATURE (23)..(23): X is I, L or V
  MISC_FEATURE (24)..(24): X is K, R or H for basic amino acids
  MISC_FEATURE (25)..(25): X is N or Q for amidated amino acids
  MISC_FEATURE (26)..(26): X is A and G
  MISC_FEATURE (27)..(27): X is D and E for acidic amino acids
  MISC_FEATURE (28)..(28): X is K, R or H for basic amino acids
  MISC_FEATURE (29)..(29): X is I, L or V
  MISC_FEATURE (30)..(30): X is D and E for acidic amino acids
  MISC_FEATURE (31)..(31): X is K, R or H for basic amino acids
  MISC_FEATURE (32)..(32): X is I, L or V
  MISC_FEATURE (33)..(33): X is D and E for acidic amino acids

SEQ ID NO: 451 - protein, 29 aa, Artificial
  Completely synthesized peptide construct
VFIKRVSNVIIHGGGGDLLKNGERIEKVE

SEQ ID NO: 452 - protein, 29 aa, Artificial
  peptide construct
  MISC_FEATURE (1)..(1): X is I, L or V
  MISC_FEATURE (2)..(2): X is F, W or Y for aromatic amino acids
  MISC_FEATURE (3)..(3): X is I, L or V
  MISC_FEATURE (4)..(4): X is K, R or H for basic amino acids
  MISC_FEATURE (5)..(5): X is K, R or H for basic amino acids
  MISC_FEATURE (6)..(6): X is I, L or V
  MISC_FEATURE (7)..(7): X is C or S
  MISC_FEATURE (8)..(8): X is N or Q for amidated amino acids
  MISC_FEATURE (9)..(9): X is I, L or V
  MISC_FEATURE (10)..(10): X is I, L or V
  MISC_FEATURE (11)..(11): X is I, L or V
  MISC_FEATURE (12)..(12): X is K, R or H for basic amino acids
  MISC_FEATURE (13)..(13): X is A or G
  MISC_FEATURE (14)..(14): X is A and G
  MISC_FEATURE (15)..(15): X is A and G
  MISC_FEATURE (16)..(16): X is A and G
  MISC_FEATURE (17)..(17): X is D and E for acidic amino acids
  MISC_FEATURE (18)..(18): X is I, L or V
  MISC_FEATURE (19)..(19): X is I, L or V
  MISC_FEATURE (20)..(20): X is  K, R or H for basic amino acids
  MISC_FEATURE (21)..(21): X is N or Q for amidated amino acids
  MISC_FEATURE (22)..(22): X is A and G
  MISC_FEATURE (23)..(23): X is D and E for acidic amino acids
  MISC_FEATURE (24)..(24): X is K, R or H for basic amino acids
  MISC_FEATURE (25)..(25): X is I, L or V
  MISC_FEATURE (26)..(26): X is D and E for acidic amino acids
  MISC_FEATURE (27)..(27): X is K, R or H for basic amino acids
  MISC_FEATURE (28)..(28): X is I, L or V
  MISC_FEATURE (29)..(29): X is D and E for acidic amino acids
XXXXXXXXXXXXXXXXXXXXXXXXXXXXX

SEQ ID NO: 453 - protein, 31 aa, Artificial
  Completely synthesized peptide construct
MKVTVAFNQFGPNRRGGGDLLKNGERIEKVE

SEQ ID NO: 454 - protein, 31 aa, Artificial; identical to SEQ ID NO: 130
  peptide construct
  MISC_FEATURE (1)..(1): X is M or Nle
  MISC_FEATURE (2)..(2): X is K, R or H for basic amino acids
  MISC_FEATURE (3)..(3): X is I, L or V
  MISC_FEATURE (4)..(4): X is T or S
  MISC_FEATURE (5)..(5): X is I, L or V
  MISC_FEATURE (6)..(6): X is A or G
  MISC_FEATURE (7)..(7): X is F, W or Y for aromatic amino acids
  MISC_FEATURE (8)..(8): X is N or Q for amidated amino acids
  MISC_FEATURE (9)..(9): X is N or Q for amidated amino acids
  MISC_FEATURE (10)..(10): X is F, W or Y for amidated amino acids
  MISC_FEATURE (11)..(11): X is A or G
  MISC_FEATURE (12)..(12): X is F or P
  MISC_FEATURE (13)..(13): X is N or Q for amidated amino acids
  MISC_FEATURE (14)..(14): X is K, R or H for basic amino acids
  MISC_FEATURE (15)..(15): X is K, R or H for basic amino acids
  MISC_FEATURE (16)..(16): X is A and G
  MISC_FEATURE (17)..(17): X is A and G
  MISC_FEATURE (18)..(18): X is A and G
  MISC_FEATURE (19)..(19): X is D and E for acidic amino acids
  MISC_FEATURE (20)..(20): X is I, L or V
  MISC_FEATURE (21)..(21): X is I, L or V
  MISC_FEATURE (22)..(22): X is K, R or H for basic amino acids
  MISC_FEATURE (23)..(23): X is N or Q for amidated amino acids
  MISC_FEATURE (24)..(24): X is A and G
  MISC_FEATURE (25)..(25): X is D and E for acidic amino acids
  MISC_FEATURE (26)..(26): X is K, R or H for basic amino acids
  MISC_FEATURE (27)..(27): X is I, L or V
  MISC_FEATURE (28)..(28): X is D and E for acidic amino acids
  MISC_FEATURE (29)..(29): X is K, R or H for basic amino acids
  MISC_FEATURE (30)..(30): X is I, L or V
  MISC_FEATURE (31)..(31): X is D and E for acidic amino acids

SEQ ID NO: 455 - protein, 31 aa, Artificial
  Completely synthesized peptide construct
IASRRVDGIIAAYQNGGGDLLKNGERIEKVE

SEQ ID NO: 456 - protein, 31 aa, Artificial; identical to SEQ ID NO: 130
  peptide construct
  MISC_FEATURE (1)..(1): X is I, L or V
  MISC_FEATURE (2)..(2): X is A or G
  MISC_FEATURE (3)..(3): X is C or S
  MISC_FEATURE (4)..(4): X is K, R or H for basic amino acids
  MISC_FEATURE (5)..(5): X is K, R or H for basic amino acids
  MISC_FEATURE (6)..(6): X is I, L or V
  MISC_FEATURE (7)..(7): X is D and E for acidic amino acids
  MISC_FEATURE (8)..(8): X is A or G
  MISC_FEATURE (9)..(9): X is I, L or V
  MISC_FEATURE (10)..(10): X is I, L or V
  MISC_FEATURE (11)..(11): X is A or G
  MISC_FEATURE (12)..(12): X is A or G
  MISC_FEATURE (13)..(13): X is F, W or Y for aromatic amino acids
  MISC_FEATURE (14)..(14): X is N or Q for amidated amino acids
  MISC_FEATURE (15)..(15): X is N or Q for amidated amino acids
  MISC_FEATURE (16)..(16): X is A and G
  MISC_FEATURE (17)..(17): X is A and G
  MISC_FEATURE (18)..(18): X is A and G
  MISC_FEATURE (19)..(19): X is D and E for acidic amino acids
  MISC_FEATURE (20)..(20): X is I, L or V
  MISC_FEATURE (21)..(21): X is I, L or V
  MISC_FEATURE (22)..(22): X is K, R or H for basic amino acids
  MISC_FEATURE (23)..(23): X is N or Q for amidated amino acids
  MISC_FEATURE (24)..(24): X is A and G
  MISC_FEATURE (25)..(25): X is D and E for acidic amino acids
  MISC_FEATURE (26)..(26): X is K, R or H for basic amino acids
  MISC_FEATURE (27)..(27): X is I, L or V
  MISC_FEATURE (28)..(28): X is D and E for acidic amino acids
  MISC_FEATURE (29)..(29): X is K, R or H for basic amino acids
  MISC_FEATURE (30)..(30): X is I, L or V
  MISC_FEATURE (31)..(31): X is D and E for acidic amino acids

SEQ ID NO: 457 - protein, 35 aa, Artificial
  Completely synthesized peptide construct
IDIFASKNFHLQKNTIGTGGGGDLLKNGERIEKVE

SEQ ID NO: 458 - protein, 35 aa, Artificial; identical to SEQ ID NO: 206
  peptide construct
  MISC_FEATURE (1)..(1): X is I, L or V
  MISC_FEATURE (2)..(2): X is D and E for acidic amino acids
  MISC_FEATURE (3)..(3): X is I, L or V
  MISC_FEATURE (4)..(4): X is F, W or Y for aromatic amino acids
  MISC_FEATURE (5)..(5): X is A or G
  MISC_FEATURE (6)..(6): X is C or S
  MISC_FEATURE (7)..(7): X is K, R or H for basic amino acids
  MISC_FEATURE (8)..(8): X is N or Q for amidated amino acids
  MISC_FEATURE (9)..(9): X is F, W or Y for aromatic amino acids
  MISC_FEATURE (10)..(10): X is K, R or H for basic amino acids
  MISC_FEATURE (11)..(11): X is I, L or V
  MISC_FEATURE (12)..(12): X is N or Q for amidated amino acids
  MISC_FEATURE (13)..(13): X is K, R or H for basic amino acids
  MISC_FEATURE (14)..(14): X is N or Q for amidated amino acids
  MISC_FEATURE (15)..(15): X is T or S
  MISC_FEATURE (16)..(16): X is I, L or V
  MISC_FEATURE (17)..(17): X is A or G
  MISC_FEATURE (18)..(18): X is T or S
  MISC_FEATURE (19)..(19): X is A or G
  MISC_FEATURE (20)..(20): X is A and G
  MISC_FEATURE (21)..(21): X is A and G
  MISC_FEATURE (22)..(22): X is A and G
  MISC_FEATURE (23)..(23): X is D and E for acidic amino acids
  MISC_FEATURE (24)..(24): X is I, L or V
  MISC_FEATURE (25)..(25): X is I, L or V
  MISC_FEATURE (26)..(26): X is K, R or H for basic amino acids
  MISC_FEATURE (27)..(27): X is N or Q for amidated amino acids
  MISC_FEATURE (28)..(28): X is A and G
  MISC_FEATURE (29)..(29): X is D and E for acidic amino acids
  MISC_FEATURE (30)..(30): X is K, R or H for basic amino acids
  MISC_FEATURE (31)..(31): X is I, L or V
  MISC_FEATURE (32)..(32): X is D and E for acidic amino acids
  MISC_FEATURE (33)..(33): X is K, R or H for basic amino acids
  MISC_FEATURE (34)..(34): X is I, L or V
  MISC_FEATURE (35)..(35): X is D and E for acidic amino acids

SEQ ID NO: 459 - protein, 41 aa, Artificial
  Completely synthesized peptide construct
GIGAVLKVLTTGPALISWIKRKRQQGGGDLLKNGERIEKVE

SEQ ID NO: 460 - protein, 41 aa, Artificial; identical to SEQ ID NO: 380
  Completely synthesized peptide construct
  MISC_FEATURE (1)..(1): X is A or G
  MISC_FEATURE (2)..(2): X is I, L or V
  MISC_FEATURE (3)..(3): X is A or G
  MISC_FEATURE (4)..(4): X is A or G
  MISC_FEATURE (5)..(5): X is I, L or V
  MISC_FEATURE (6)..(6): X is I, L or V
  MISC_FEATURE (7)..(7): X is K, R or H for basic amino acids
  MISC_FEATURE (8)..(8): X is I, L or V
  MISC_FEATURE (9)..(9): X is I, L or V
  MISC_FEATURE (10)..(10): X is T or S
  MISC_FEATURE (11)..(11): X is T or S
  MISC_FEATURE (12)..(12): X is A or G
  MISC_FEATURE (13)..(13): X is F or P
  MISC_FEATURE (14)..(14): X is A or G
  MISC_FEATURE (15)..(15): X is I, L or V
  MISC_FEATURE (16)..(16): X is I, L or V
  MISC_FEATURE (17)..(17): X is C or S
  MISC_FEATURE (18)..(18): X is F, W or Y for aromatic amino acids
  MISC_FEATURE (19)..(19): X is I, L or V
  MISC_FEATURE (20)..(20): X is K, R or H for basic amino acids
  MISC_FEATURE (21)..(21): X is K, R or H for basic amino acids
  MISC_FEATURE (22)..(22): X is K, R or H for basic amino acids
  MISC_FEATURE (23)..(23): X is K, R or H for basic amino acids
  MISC_FEATURE (24)..(24): X is N or Q for amidated amino acids
  MISC_FEATURE (25)..(25): X is N or Q for amidated amino acids
  MISC_FEATURE (26)..(26): X is A and G
  MISC_FEATURE (27)..(27): X is A and G
  MISC_FEATURE (28)..(28): X is A and G
  MISC_FEATURE (29)..(29): X is D and E for acidic amino acids
  MISC_FEATURE (30)..(30): X is I, L or V
  MISC_FEATURE (31)..(31): X is I, L or V
  MISC_FEATURE (32)..(32): X is K, R or H for basic amino acids
  MISC_FEATURE (33)..(33): X is N or Q for amidated amino acids
  MISC_FEATURE (34)..(34): X is A and G
  MISC_FEATURE (35)..(35): X is D and E for acidic amino acids
  MISC_FEATURE (36)..(36): X is K, R or H for basic amino acids
  MISC_FEATURE (37)..(37): X is I, L or V
  MISC_FEATURE (38)..(38): X is D and E for acidic amino acids
  MISC_FEATURE (39)..(39): X is K, R or H for basic amino acids
  MISC_FEATURE (40)..(40): X is I, L or V
  MISC_FEATURE (41)..(41): X is D and E for acidic amino acids

SEQ ID NO: 461 - protein, 21 aa, Artificial
  Completely synthesized peptide construct
VSSVSSQFSDAAQASPSSHSS

SEQ ID NO: 462 - protein, 21 aa, Artificial
  Completely synthesized peptide construct
  MISC_FEATURE (1)..(1): X is I, L or V
  MISC_FEATURE (2)..(2): X is T or S
  MISC_FEATURE (3)..(3): X is T or S
  MISC_FEATURE (4)..(4): X is I, L or V
  MISC_FEATURE (5)..(5): X is T or S
  MISC_FEATURE (6)..(6): X is T or S
  MISC_FEATURE (7)..(7): X is N or Q for amidated amino acids
  MISC_FEATURE (8)..(8): X is F or P
  MISC_FEATURE (9)..(9): X is T or S
  MISC_FEATURE (10)..(10): X is D and E for acidic amino acids
  MISC_FEATURE (11)..(11): X is A and G
  MISC_FEATURE (12)..(12): X is A and g
  MISC_FEATURE (13)..(13): X is T or S
  MISC_FEATURE (14)..(14): X is A and G
  MISC_FEATURE (15)..(15): X is T or S
  MISC_FEATURE (16)..(16): X is F or P
  MISC_FEATURE (17)..(17): X is T or S
  MISC_FEATURE (18)..(18): X is T or S
  MISC_FEATURE (19)..(19): X is K, R or H for basic amino acids
  MISC_FEATURE (20)..(20): X is T or S
  MISC_FEATURE (21)..(21): X is T or S
XXXXXXXXXXXXXXXXXXXXX

SEQ ID NO: 463 - protein, 16 aa, Artificial
  completely synthesized peptide construct
DLLKNGERIEKVEGGG

SEQ ID NO: 464 - protein, 22 aa, Artificial
  Completely synthesized peptide construct
  MISC_FEATURE (1)..(1): X is acetyl or propionyl group, D glycine or D alanine, cyclohexylalanine at amino terminus
  MISC_FEATURE (2)..(2): X is I, L or V
  MISC_FEATURE (3)..(3): X is T or S
  MISC_FEATURE (4)..(4): X is T or S
  MISC_FEATURE (5)..(5): X is I, L or V
  MISC_FEATURE (6)..(6): X is T or S
  MISC_FEATURE (7)..(7): X is T or S
  MISC_FEATURE (8)..(8): X is N or Q for amidated amino acids
  MISC_FEATURE (9)..(9): X is F or P
  MISC_FEATURE (10)..(10): X is T or S
  MISC_FEATURE (11)..(11): X is D and E for acidic amino acids
  MISC_FEATURE (12)..(12): X is A and G
  MISC_FEATURE (13)..(13): X is A and G
  MISC_FEATURE (14)..(14): X is T or S
  MISC_FEATURE (15)..(15): X is A and G
  MISC_FEATURE (16)..(16): X is T or S
  MISC_FEATURE (17)..(17): X is F or P
  MISC_FEATURE (18)..(18): X is T or S
  MISC_FEATURE (19)..(19): X is T or S
  MISC_FEATURE (20)..(20): X is K, R or H for basic amino acids
  MISC_FEATURE (21)..(21): X is T or S
  MISC_FEATURE (22)..(22): X is T or S
XXXXXXXXXXXXXXXXXXXXXX

SEQ ID NO: 465 - protein, 21 aa, Artificial
  Completely synthesized peptide construct
MVWESGCTVIVMLTPLVEDGV

SEQ ID NO: 466 - protein, 21 aa, Artificial
  Completely synthesized peptide construct
  MISC_FEATURE (1)..(1): X is M or Nle (Norleucine)
  MISC_FEATURE (2)..(2): X is I, L or V
  MISC_FEATURE (3)..(3): X is F, W or Y for aromatic amino acids
  MISC_FEATURE (4)..(4): X is D and E for acidic amino acids
  MISC_FEATURE (5)..(5): X is T or S
  MISC_FEATURE (6)..(6): X is A and G
  MISC_FEATURE (7)..(7): X is C or S
  MISC_FEATURE (8)..(8): X is T or S
  MISC_FEATURE (9)..(9): X is I, L or V
  MISC_FEATURE (10)..(10): X is I, L or V
  MISC_FEATURE (11)..(11): X is I, L or V
  MISC_FEATURE (12)..(12): X is M or Nle (Norleucine)
  MISC_FEATURE (13)..(13): X is I, L or V
  MISC_FEATURE (14)..(14): X is I, L or V
  MISC_FEATURE (15)..(15): X is F or P
  MISC_FEATURE (16)..(16): X is I, L or V
  MISC_FEATURE (17)..(17): X is I, L or V
  MISC_FEATURE (18)..(18): X is D and E for acidic amino acids
  MISC_FEATURE (19)..(19): X is D and E for acidic amino acids
  MISC_FEATURE (20)..(20): X is A and G
  MISC_FEATURE (21)..(21): X is I, L or V
XXXXXXXXXXXXXXXXXXXXX

SEQ ID NO: 467 - protein, 22 aa, Artificial
  Completely synthesized peptide construct
  MISC_FEATURE (1)..(1): X is acetyl or propionyl group, D glycine or D alanine, cyclohexylalanine at amino terminus
  MISC_FEATURE (2)..(2): X is M or Nle (Norleucine)
  MISC_FEATURE (3)..(3): X is I, L or V
  MISC_FEATURE (4)..(4): X is F, W or Y for aromatic amino acids
  MISC_FEATURE (5)..(5): X is D and E for acidic amino acids
  MISC_FEATURE (6)..(6): X is T or S
  MISC_FEATURE (7)..(7): X is A and G
  MISC_FEATURE (8)..(8): X is C or S
  MISC_FEATURE (9)..(9): X is T or S
  MISC_FEATURE (10)..(10): X is I, L or V
  MISC_FEATURE (11)..(11): X is I, L or V
  MISC_FEATURE (12)..(12): X is I, L or V
  MISC_FEATURE (13)..(13): X is M or Nle (Norleucine)
  MISC_FEATURE (14)..(14): X is I, L or V
  MISC_FEATURE (15)..(15): X is I, L or V
  MISC_FEATURE (16)..(16): X is F or P
  MISC_FEATURE (17)..(17): X is I, L or V
  MISC_FEATURE (18)..(18): X is I, L or V
  MISC_FEATURE (19)..(19): X is I, L or V
  MISC_FEATURE (19)..(19): X is D and E for acidic amino acids
  MISC_FEATURE (20)..(20): X is D and E for acidic amino acids
  MISC_FEATURE (21)..(21): X is A and G
  MISC_FEATURE (22)..(22): X is I, L or V
XXXXXXXXXXXXXXXXXXXXXX

SEQ ID NO: 468 - protein, 20 aa, Artificial
  Completely synthesized peptide construct
  MISC_FEATURE (1)..(1): X is M or Nle (Norleucine)
  MISC_FEATURE (2)..(2): X is I, L or V
  MISC_FEATURE (3)..(3): X is F, W or Y for aromatic amino acids
  MISC_FEATURE (4)..(4): X is D and E for acidic amino acids
  MISC_FEATURE (5)..(5): X is T or S
  MISC_FEATURE (6)..(6): X is A and G
  MISC_FEATURE (7)..(7): X is C or S
  MISC_FEATURE (8)..(8): X is T or S
  MISC_FEATURE (9)..(9): X is Gaba2 for X2X3 or X3X3 or X2X3 or X3X2 or X3X3 or X2X2
  MISC_FEATURE (10)..(10): X is I, L or V
  MISC_FEATURE (11)..(11): X is M or Nle (Norleucine)
  MISC_FEATURE (12)..(12): X is I, L or V
  MISC_FEATURE (13)..(13): X is I, L or V
  MISC_FEATURE (14)..(14): X is F or P
  MISC_FEATURE (15)..(15): X is I, L or V
  MISC_FEATURE (16)..(16): X is I, L or V
  MISC_FEATURE (17)..(17): X is D and E or acidic amino acids
  MISC_FEATURE (18)..(18): X is D and E or acidic amino acids
  MISC_FEATURE (19)..(19): X is A and G
  MISC_FEATURE (20)..(20): X is I, L or V
XXXXXXXXXXXXXXXXXXXX

SEQ ID NO: 469 - protein, 20 aa, Artificial
  Completely synthesized peptide construct
  MISC_FEATURE (1)..(1): X is M or Nle (Norleucine)
  MISC_FEATURE (2)..(2): X is I, L or V
  MISC_FEATURE (3)..(3): X is F, W or Y for aromatic amino acids
  MISC_FEATURE (4)..(4): X is D and E for acidic amino acids
  MISC_FEATURE (5)..(5): X is T or S
  MISC_FEATURE (6)..(6): X is A and G
  MISC_FEATURE (7)..(7): X is C or S
  MISC_FEATURE (8)..(8): X is T or s
  MISC_FEATURE (9)..(9): X is I, L or V
  MISC_FEATURE (10)..(10): X is Gaba2 for X2X3 or X3X2 or X2X3 or X3X2 or X3X3 or X2X2
  MISC_FEATURE (11)..(11): X is M or Nle (Norleucine)
  MISC_FEATURE (12)..(12): X is I, L or V
  MISC_FEATURE (13)..(13): X is I, L or V
  MISC_FEATURE (14)..(14): X is F or P
  MISC_FEATURE (15)..(15): X is I, L or V
  MISC_FEATURE (16)..(16): X is I, L or V
  MISC_FEATURE (17)..(17): X is D and E for acidic amino acids
  MISC_FEATURE (18)..(18): X is D and E for acidic amino acids
  MISC_FEATURE (19)..(19): X is A and G
  MISC_FEATURE (20)..(20): X is I, L or V
XXXXXXXXXXXXXXXXXXXX

SEQ ID NO: 470 - protein, 20 aa, Artificial
  Completely synthesized peptide construct
  MISC_FEATURE (1)..(1): X is M or Nle (Norleucine)
  MISC_FEATURE (2)..(2): X is I, L or V
  MISC_FEATURE (3)..(3): X is F, W or Y for aromatic amino acids
  MISC_FEATURE (4)..(4): X is D and E for acidic amino acids
  MISC_FEATURE (5)..(5): X is T or S
  MISC_FEATURE (6)..(6): X is A and G
  MISC_FEATURE (7)..(7): X is C or S
  MISC_FEATURE (8)..(8): X is T or S
  MISC_FEATURE (9)..(9): X is I, L or V
  MISC_FEATURE (10)..(10): X is I, L or V
  MISC_FEATURE (11)..(11): X is I, L or V
  MISC_FEATURE (12)..(12): X is I, L or V
  MISC_FEATURE (12)..(12): X is M or Nle (Norleucine)
  MISC_FEATURE (13)..(13): X is I, L or V
  MISC_FEATURE (14)..(14): X is I, L or V
  MISC_FEATURE (15)..(15): X is F or P
  MISC_FEATURE (16)..(16): X is I, L or V
  MISC_FEATURE (17)..(17): X is I, L or V
  MISC_FEATURE (18)..(18): X is Gaba2 for X2X3 or X3X2 or X2X3 or X3X2 or X3X3 or X2X2
  MISC_FEATURE (19)..(19): X is A and G
  MISC_FEATURE (20)..(20): X is I, L or V
XXXXXXXXXXXXXXXXXXXX

SEQ ID NO: 471 - protein, 19 aa, Artificial
  Completely synthesized peptide construct
  MISC_FEATURE (1)..(1): X is M or Nle (Norleucine)
  MISC_FEATURE (2)..(2): X is I, L or V
  MISC_FEATURE (3)..(3): X is F, W or Y for aromatic amino acids
  MISC_FEATURE (4)..(4): X is D and E for acidic amino acids
  MISC_FEATURE (5)..(5): X is T or S
  MISC_FEATURE (6)..(6): X is A and G
  MISC_FEATURE (7)..(7): X is C or S
  MISC_FEATURE (8)..(8): X is T or S
  MISC_FEATURE (9)..(9): X is 5-aminopentanoic acid for replacement of 3 or 4 amino acids of X2 and X3
  MISC_FEATURE (10)..(10): X is M or Nle (Norleucine)
  MISC_FEATURE (11)..(11): X is I, L or V
  MISC_FEATURE (12)..(12): X is I, L or V
  MISC_FEATURE (13)..(13): X is F or P
  MISC_FEATURE (14)..(14): X is I, L or V
  MISC_FEATURE (15)..(15): X is I, L or V
  MISC_FEATURE (16)..(16): X is D and E for acidic amino acids
  MISC_FEATURE (17)..(17): X is D and E for acidic amino acids
  MISC_FEATURE (18)..(18): X is A and G
  MISC_FEATURE (19)..(19): X is I, L or V
XXXXXXXXXXXXXXXXXXX

SEQ ID NO: 472 - protein, 18 aa, Artificial
  Completely synthesized peptide construct
  MISC_FEATURE (1)..(1): X is M or Nle (Norleucine)
  MISC_FEATURE (2)..(2): X is I, L or V
  MISC_FEATURE (3)..(3): X is F, W or Y for aromatic amino acids
  MISC_FEATURE (4)..(4): X is D and E for acidic amino acids
  MISC_FEATURE (5)..(5): X is T or S
  MISC_FEATURE (6)..(6): X is A and G
  MISC_FEATURE (7)..(7): X is C or S
  MISC_FEATURE (8)..(8): X is T or S
  MISC_FEATURE (9)..(9): X is I, L or V
  MISC_FEATURE (10)..(10): X is I, L or V
  MISC_FEATURE (11)..(11): X is I, L or V
  MISC_FEATURE (12)..(12): X is M or Nle (Norleucine)
  MISC_FEATURE (13)..(13): X is I, L or V
  MISC_FEATURE (14)..(14): X is I, L or V
  MISC_FEATURE (15)..(15): X is F or P
  MISC_FEATURE (16)..(16): X is 5-aminopentanoic acid for replacement of 3 or 4 amino acids of X2 and X3
  MISC_FEATURE (17)..(17): X is A and G
  MISC_FEATURE (18)..(18): X is I, L or V
XXXXXXXXXXXXXXXXXX

SEQ ID NO: 473 - protein, 16 aa, Artificial
  Completely synthesized peptide construct
  MISC_FEATURE (1)..(1): X is N or Q for amidated amino acids
  MISC_FEATURE (2)..(2): X is I, L or V
  MISC_FEATURE (3)..(3): X is F, W or Y for aromatic amino acids
  MISC_FEATURE (4)..(4): X is D and E for acidic amino acids
  MISC_FEATURE (5)..(5): X is T or S
  MISC_FEATURE (6)..(6): X is A and G
  MISC_FEATURE (7)..(7): X is C or S
  MISC_FEATURE (8)..(8): X is T or S
  MISC_FEATURE (9)..(9): X is 5-aminopentanoic acid for replacement of 3 or 4 amino acids of X2 and X3
  MISC_FEATURE (10)..(10): X is M or Nle (Norleucine)
  MISC_FEATURE (11)..(11): X is I, L or V
  MISC_FEATURE (12)..(12): X is I, L or V
  MISC_FEATURE (13)..(13): X is F or P
  MISC_FEATURE (14)..(14): X is 5-aminopentanoic acid for replacement of 3 or 4 amino acids of X2 and X3
  MISC_FEATURE (15)..(15): X is A and G
  MISC_FEATURE (16)..(16): X is I, L or V
XXXXXXXXXXXXXXXX

SEQ ID NO: 474 - protein, 17 aa, Artificial
  Completely synthesized peptide construct
  MISC_FEATURE (1)..(1): X is M or Nle (Norleucine)
  MISC_FEATURE (2)..(2): X is I, L or V
  MISC_FEATURE (3)..(3): X is F, W or Y for aromatic amino acids
  MISC_FEATURE (4)..(4): X is D and E for acidic amino acids
  MISC_FEATURE (5)..(5): X is T or S
  MISC_FEATURE (6)..(6): X is A and G
  MISC_FEATURE (7)..(7): X is C or S
  MISC_FEATURE (8)..(8): X is T or S
  MISC_FEATURE (9)..(9): X is Gaba2 for X2X3 or X3X2 or X2X3 or X3X2 or X3X3 or X2X2
  MISC_FEATURE (10)..(10): X is I, L or V
  MISC_FEATURE (11)..(11): X is M or Nle (Norleucine)
  MISC_FEATURE (12)..(12): X is Gaba2 for X2X3 or X3X2 or X2X3 or X3X2 or X3X3 or X2X2
  MISC_FEATURE (13)..(13): X is F or P
  MISC_FEATURE (14)..(14): X is Gaba2 for X2X3 or X3X2 or X2X3 or X3X2 or X3X3 or X2X2
  MISC_FEATURE (15)..(15): X is Gaba2 for X2X3 or X3X2 or X2X3 or X3X2 or X3X3 or X2X2
  MISC_FEATURE (16)..(16): X is A and G
  MISC_FEATURE (17)..(17): X is I, L or V
XXXXXXXXXXXXXXXXX

SEQ ID NO: 475 - protein, 21 aa, Artificial
  Completely synthesized peptide construct
  MISC_FEATURE (1)..(1): X is acetyl or propionyl group, D glycine or D alanine, cyclohexylalanine at amino terminus
  MISC_FEATURE (2)..(2): X is M or Nle (Norleucine)
  MISC_FEATURE (3)..(3): X is I, L or V
  MISC_FEATURE (4)..(4): X is F, W or Y for aromatic amino acids
  MISC_FEATURE (5)..(5): X is D and E for acidic amino acids
  MISC_FEATURE (6)..(6): X is T or S
  MISC_FEATURE (7)..(6): X is A and G
  misc_feature (7)..(7): Xaa can be any naturally occurring amino acid
  MISC_FEATURE (8)..(8): X is C or S
  MISC_FEATURE (9)..(9): X is T or S
  MISC_FEATURE (10)..(10): X is Gaba2 for X2X3 or X3X2 or X2X3 or X3X2 or X3X3 or X2X2
  MISC_FEATURE (11)..(11): X is I, L or V
  MISC_FEATURE (12)..(12): X is M or Nle (Norleucine)
  MISC_FEATURE (13)..(13): X is I, L or V
  MISC_FEATURE (14)..(14): X is I, L or V
  MISC_FEATURE (15)..(15): X is F or P
  MISC_FEATURE (16)..(16): X is I, L or V
  MISC_FEATURE (17)..(17): X is I, L or V
  MISC_FEATURE (18)..(18): X is D and E for acidic amino acids
  MISC_FEATURE (19)..(19): X is D and E for acidic amino acids
  MISC_FEATURE (20)..(20): X is A and G
  MISC_FEATURE (21)..(21): X is I, L or V
XXXXXXXXXXXXXXXXXXXXX

SEQ ID NO: 476 - protein, 21 aa, Artificial
  Completely synthesized peptide construct
  MISC_FEATURE (1)..(1): X is acetyl or propionyl group, D glycine or D alanine, cyclohexylalanine at amino terminus
  MISC_FEATURE (2)..(2): X is M or Nle (Norleucine)
  MISC_FEATURE (3)..(3): X is I, L or V
  MISC_FEATURE (4)..(4): X is F, W or Y for aromatic amino acids
  MISC_FEATURE (5)..(5): X is D and E for acidic amino acids
  MISC_FEATURE (6)..(6): X is T or S
  MISC_FEATURE (7)..(7): X is A and G
  MISC_FEATURE (8)..(8): X is C or S
  MISC_FEATURE (9)..(9): X is T or S
  MISC_FEATURE (10)..(10): X is I, L or V
  MISC_FEATURE (11)..(11): X is Gaba2 for X2X3 or X3X2 or X2X3 or X3X2 or X3X3 or X2X2
  MISC_FEATURE (12)..(12): X is M or Nle (Norleucine)
  MISC_FEATURE (13)..(13): X is I, L or V
  MISC_FEATURE (14)..(14): X is I, L or V
  MISC_FEATURE (15)..(15): X is F or P
  MISC_FEATURE (16)..(16): X is I, L or V
  MISC_FEATURE (17)..(17): X is I, L or V
  MISC_FEATURE (18)..(18): X is D and E for acidic amino acids
  MISC_FEATURE (19)..(19): X is D and E for acidic amino acids
  MISC_FEATURE (20)..(20): X is A and G
  MISC_FEATURE (21)..(21): X is I, L or V
XXXXXXXXXXXXXXXXXXXXX

SEQ ID NO: 477 - protein, 21 aa, Artificial
  Completely synthesized peptide construct
  MISC_FEATURE (1)..(1): X is acetyl or propionyl group, D glycine or D alanine, cyclohexylalanine at amino terminus
  MISC_FEATURE (2)..(2): X is M or Nle (Norleucine)
  MISC_FEATURE (3)..(3): X is I, L or V
  MISC_FEATURE (4)..(4): X is F, W or Y for aromatic amino acids
  MISC_FEATURE (5)..(5): X is D and E for acidic amino acids
  MISC_FEATURE (6)..(5): X is T or S
  misc_feature (6)..(6): Xaa can be any naturally occurring amino acid
  MISC_FEATURE (7)..(7): X is A and G
  MISC_FEATURE (8)..(8): X is C or S
  MISC_FEATURE (9)..(9): X is T or S
  MISC_FEATURE (10)..(10): X is I, L or V
  MISC_FEATURE (11)..(11): X is I, L or V
  MISC_FEATURE (12)..(12): X is I, L or V
  MISC_FEATURE (13)..(13): X is M or Nle (Norleucine)
  MISC_FEATURE (14)..(14): X is I, L or V
  MISC_FEATURE (15)..(15): X is I, L or V
  MISC_FEATURE (16)..(16): X is F or P
  MISC_FEATURE (17)..(17): X is I, L or V
  MISC_FEATURE (18)..(18): X is I, L or V
  MISC_FEATURE (19)..(19): X is Gaba2 for X2X3 or X3X2 or X2X3 or X3X2 or X3X3 or X2X2
  MISC_FEATURE (20)..(20): X is A and G
  MISC_FEATURE (21)..(21): X is I, L or V
XXXXXXXXXXXXXXXXXXXXX

SEQ ID NO: 478 - protein, 20 aa, Artificial
  Completely synthesized peptide construct
  MISC_FEATURE (1)..(1): X is acetyl or propionyl group, D glycine or D alanine, cyclohexylalanine at amino terminus
  MISC_FEATURE (2)..(2): X is M or Nle (Norleucine)
  MISC_FEATURE (3)..(3): X is I, L or V
  MISC_FEATURE (4)..(4): X is F, W or Y for aromatic amino acids
  MISC_FEATURE (5)..(5): X is D and E for acidic amino acids
  MISC_FEATURE (6)..(6): X is T or S
  MISC_FEATURE (7)..(7): X is A and G
  MISC_FEATURE (8)..(8): X is C or S
  MISC_FEATURE (9)..(9): X isT or S
  MISC_FEATURE (10)..(10): X is T or S
  MISC_FEATURE (10)..(10): X is 5-aminopentanoic acid for replacement of 3 or 4 amino acids of X2 and X3
  MISC_FEATURE (11)..(11): X is M or Nle (Norleucine)
  MISC_FEATURE (12)..(12): X is I, L or V
  MISC_FEATURE (13)..(13): X is I, L or V
  MISC_FEATURE (14)..(14): X is F or P
  MISC_FEATURE (15)..(15): X is I, L or V
  MISC_FEATURE (16)..(16): X is I, L or V
  MISC_FEATURE (17)..(17): X is D and E for acidic amino acids
  MISC_FEATURE (18)..(18): X is D and E for acidic amino acids
  MISC_FEATURE (19)..(19): X is A and G
  MISC_FEATURE (20)..(20): X is I, L or V
XXXXXXXXXXXXXXXXXXXX

SEQ ID NO: 479 - protein, 19 aa, Artificial
  Completely synthesized peptide construct
  MISC_FEATURE (1)..(1): X is acetyl or propionyl group, D glycine or D alanine, cyclohexylalanine at amino terminus
  MISC_FEATURE (2)..(2): X is M or Nle (Norleucine)
  MISC_FEATURE (3)..(3): X is I, L or V
  MISC_FEATURE (4)..(4): X is F, W or Y for aromatic amino acids
  MISC_FEATURE (5)..(5): X is D and E for acidic amino acids
  MISC_FEATURE (6)..(6): X is T or S
  MISC_FEATURE (7)..(7): X is A and G
  MISC_FEATURE (8)..(8): X is C or S
  MISC_FEATURE (9)..(9): X is T or S
  MISC_FEATURE (10)..(10): X is I, L or V
  MISC_FEATURE (11)..(11): X is I, L or V
  MISC_FEATURE (12)..(12): X is I, L or V
  MISC_FEATURE (13)..(13): X is M or Nle (Norleucine)
  MISC_FEATURE (14)..(14): X is I, L or V
  MISC_FEATURE (15)..(15): X is I, L or V
  MISC_FEATURE (16)..(16): X is F or P
  MISC_FEATURE (17)..(17): X is 5-aminopentanoic acid for replacement of 3 or 4 amino acids of X2 and X3
  MISC_FEATURE (18)..(18): X is A and G
  MISC_FEATURE (19)..(19): X is I, L or V
XXXXXXXXXXXXXXXXXXX

SEQ ID NO: 480 - protein, 17 aa, Artificial
  Completely synthesized peptide construct
  MISC_FEATURE (1)..(1): X is acetyl or propionyl group, D glycine or D alanine, cyclohexylalanine at amino terminus
  MISC_FEATURE (2)..(2): X is M or Nle (Norleucine)
  MISC_FEATURE (3)..(3): X is I, L or V
  MISC_FEATURE (4)..(4): X is F, W or Y for aromatic amino acids
  MISC_FEATURE (5)..(5): X is D and E for acidic amino acids
  MISC_FEATURE (6)..(6): X is T or S
  MISC_FEATURE (7)..(6): X is A and G
  misc_feature (7)..(7): Xaa can be any naturally occurring amino acid
  MISC_FEATURE (8)..(8): X is C or S
  MISC_FEATURE (9)..(9): X is T or S
  MISC_FEATURE (10)..(10): X is 5-aminopentanoic acid for replacement of 3 or 4 amino acids of X2 and X3
  MISC_FEATURE (11)..(11): X is M or Nle (Norleucine)
  MISC_FEATURE (12)..(12): X is I, L or V
  MISC_FEATURE (13)..(13): X is I, L or V
  MISC_FEATURE (14)..(14): X is F or P
  MISC_FEATURE (15)..(15): X is 5-aminopentanoic acid for replacement of 3 or 4 amino acids of X2 or X3
  MISC_FEATURE (16)..(16): X is A and G
  MISC_FEATURE (17)..(17): X is I, L or V
XXXXXXXXXXXXXXXXX

SEQ ID NO: 481 - protein, 18 aa, Artificial
  Completely synthesized peptide construct
  MISC_FEATURE (1)..(1): X is acetyl or propionyl group, D glycine or D alaninie, cyclohexylalanine at amino terminus
  MISC_FEATURE (2)..(2): X is M or Nle (Norleucine)
  MISC_FEATURE (3)..(3): X is I, L or V
  MISC_FEATURE (4)..(4): X is F, W or Y for aromatic amino acids
  MISC_FEATURE (5)..(5): X is D and E for acidic amino acids
  MISC_FEATURE (6)..(6): X is T or S
  MISC_FEATURE (7)..(7): X is A and G
  MISC_FEATURE (8)..(8): X is C or S
  MISC_FEATURE (9)..(9): X is T or S
  MISC_FEATURE (10)..(10): X is Gaba2 for X2X3 or X3X2 or X2X3 or X3X2 or X3X3 or X2X2
  MISC_FEATURE (11)..(11): X is I, L or V
  MISC_FEATURE (12)..(12): X is M or Nle (Norleucine)
  MISC_FEATURE (13)..(13): X is A and G
  MISC_FEATURE (14)..(14): X is F or P
  MISC_FEATURE (15)..(15): X is Gaba2 for X2X3 or X3X2 or X2X3 or X3X2 or X3X3 or X2X2
  MISC_FEATURE (16)..(16): X is Gaba2 for X2X3 or X3X2 or X2X3 or X3X2 or X3X3 or X2X2
  MISC_FEATURE (17)..(17): X is A and G
  MISC_FEATURE (18)..(18): X is I, L or V
XXXXXXXXXXXXXXXXXX

SEQ ID NO: 482 - protein, 19 aa, Artificial
  Completely synthesized peptide construct
FYLKNVQTQETRTLTQFHF

SEQ ID NO: 483 - protein, 19 aa, Artificial
  Completely synthesized peptide construct
  MISC_FEATURE (1)..(1): X is F or P
  MISC_FEATURE (2)..(2): X is F, W or Y for aromatic amino acids
  MISC_FEATURE (3)..(3): X is I, L or V
  MISC_FEATURE (4)..(4): X is K, R or H for basic amino acids
  MISC_FEATURE (5)..(5): X is N or Q for amidated amino acids
  MISC_FEATURE (6)..(6): X is I, L or V
  MISC_FEATURE (7)..(7): X is N or Q for amidated amino acids
  MISC_FEATURE (8)..(8): X is T or S
  MISC_FEATURE (9)..(9): X is N or Q for amidated amino acids
  MISC_FEATURE (10)..(10): X is for D and E for acidic amino acids
  MISC_FEATURE (11)..(11): X is I, L or V
  MISC_FEATURE (12)..(12): X is K, R or H for basic amino acids
  MISC_FEATURE (13)..(13): X is T or S
  MISC_FEATURE (14)..(14): X is I, L or V
  MISC_FEATURE (15)..(15): X is T or S
  MISC_FEATURE (16)..(16): X is N or Q for amidated amino acids
  MISC_FEATURE (17)..(17): X is F or P
  MISC_FEATURE (18)..(18): X is K, R or H for basic amino acids
  MISC_FEATURE (19)..(19): X is F, W or Y for aromatic amino acids
XXXXXXXXXXXXXXXXXXX

SEQ ID NO: 484 - protein, 20 aa, Artificial
  Completely synthesized peptide construct
  MISC_FEATURE (1)..(1): X is acetyl or propionyl group, D glycine or D alanine, cyclohexylalanine at amino terminus
  MISC_FEATURE (2)..(2): X is F or P
  MISC_FEATURE (3)..(3): X is F, W or Y for aromatic amino acids
  MISC_FEATURE (4)..(4): X is I, L or V
  MISC_FEATURE (5)..(5): X is K, R or H for basic amino acids
  MISC_FEATURE (6)..(6): X is N or Q for amidated amino acids
  MISC_FEATURE (7)..(7): X is I, L or V
  MISC_FEATURE (8)..(8): X is N or Q for amidated amino acids
  MISC_FEATURE (9)..(9): X is T or S
  MISC_FEATURE (10)..(10): X is N or Q for amidated amino acids
  MISC_FEATURE (11)..(11): X is D and E for acidic amino acids
  MISC_FEATURE (12)..(12): X is I, L or V
  MISC_FEATURE (13)..(13): X is K, R or H for basic amino acids
  MISC_FEATURE (14)..(14): X is T or S
  MISC_FEATURE (15)..(15): X is I, L or V
  MISC_FEATURE (16)..(16): X is T or S
  MISC_FEATURE (17)..(17): X is N or Q for amidated amino acids
  MISC_FEATURE (18)..(18): X is F or P
  MISC_FEATURE (19)..(19): X is K, R or H for basic amino acids
  MISC_FEATURE (20)..(20): X is F, W or Y for aromatic amino acids
XXXXXXXXXXXXXXXXXXXX

SEQ ID NO: 485 - protein, 18 aa, Artificial
  Completely synthesized peptide construct
  MISC_FEATURE (1)..(1): X is F or P
  MISC_FEATURE (2)..(2): X is F, W or Y for aromatic amino acids
  MISC_FEATURE (3)..(3): X is I, L or V
  MISC_FEATURE (4)..(4): X is K, R or H for basic amino acids
  MISC_FEATURE (5)..(5): X is N or Q for amidated amino acids
  MISC_FEATURE (6)..(6): X is I, L or V
  MISC_FEATURE (7)..(7): X is N or Q for amidated amino acids
  MISC_FEATURE (8)..(8): X is T or S
  MISC_FEATURE (9)..(9): X is N or Q for amidated amino acids
  MISC_FEATURE (10)..(10)
  MISC_FEATURE (10)..(10): X is Gaba2 for X2X3 or X3X2 or X2X3 or X3X2 or X3X3 or X2X2
  MISC_FEATURE (11)..(11): X is K, R or H for basic amino acids
  MISC_FEATURE (12)..(12): X is T or S
  MISC_FEATURE (13)..(13): X is T or S
  MISC_FEATURE (14)..(14): X is T or S
  MISC_FEATURE (15)..(15): X is N or Q for amidated amino acids
  MISC_FEATURE (16)..(16): X is F or P
  MISC_FEATURE (17)..(17): X is K, R or H for basic amino acids
  MISC_FEATURE (18)..(18): X is F, W or Y for aromatic amino acids
XXXXXXXXXXXXXXXXXX

SEQ ID NO: 486 - protein, 19 aa, Artificial
  Completely synthesized peptide construct
  MISC_FEATURE (1)..(1): X is acetyl or propionyl group, D glycine or D alanine, cyclohexylalanine at amino terminus
  MISC_FEATURE (2)..(2): X is F or P
  MISC_FEATURE (3)..(3): X is F, W or Y for aromatic amino acids
  MISC_FEATURE (4)..(4): X is I, L or V
  MISC_FEATURE (5)..(5): X is K, R or H for basic amino acids
  MISC_FEATURE (6)..(6): X is N or Q for amidated amino acids
  MISC_FEATURE (7)..(7): X is I, L or V
  MISC_FEATURE (8)..(8): X is N or Q for amidated amino acids
  MISC_FEATURE (9)..(9): X is T or S
  MISC_FEATURE (10)..(10): X is N or Q for amidated amino acids
  MISC_FEATURE (11)..(11): X is GabaX for X2X3 or X3X2 or X2X3 or X3X2 or X3X3 or X2X2
  MISC_FEATURE (12)..(12): X is K, R or H for basic amino acids
  MISC_FEATURE (13)..(13): X is T or S
  MISC_FEATURE (14)..(14): X is I, L or V
  MISC_FEATURE (15)..(15): X is T or S
  MISC_FEATURE (16)..(16): X is N or Q for amidated amino acids
  MISC_FEATURE (17)..(17): X is F or P
  MISC_FEATURE (18)..(18): X is K, R or H for basic amino acids
  MISC_FEATURE (19)..(19): X is F, W or Y for aromatic amino acids
XXXXXXXXXXXXXXXXXXX

SEQ ID NO: 487 - protein, 20 aa, Artificial
  Completely synthesized peptide construct
DGEAGKPGKAGERGPPGPQG

SEQ ID NO: 488 - protein, 20 aa, Artificial
  Completely synthesized peptide construct
  MISC_FEATURE (1)..(1): X is D and E for acidic amino acids
  MISC_FEATURE (2)..(2): X is A and G
  MISC_FEATURE (3)..(3): X is D and E for acidic amino acids
  MISC_FEATURE (4)..(4): X is A and G
  MISC_FEATURE (5)..(5): X is A and G
  MISC_FEATURE (6)..(6): X is K, R or H for basic amino acids
  MISC_FEATURE (7)..(7): X is F or P
  MISC_FEATURE (8)..(8): X is A and G
  MISC_FEATURE (9)..(9): X is K, R or H for basic amino acids
  MISC_FEATURE (10)..(10): X is A and G
  MISC_FEATURE (11)..(11): X is A and G
  MISC_FEATURE (12)..(12): X is D and E for acidic amino acids
  MISC_FEATURE (13)..(13): X is K, R or H for basic amino acids
  MISC_FEATURE (14)..(14): X is A and G
  MISC_FEATURE (15)..(15): X is F or P
  MISC_FEATURE (16)..(16): X is F or P
  MISC_FEATURE (17)..(17): X is A and G
  MISC_FEATURE (18)..(18): X is F or P
  MISC_FEATURE (19)..(19): X is N or Q for amidated amino acids
  MISC_FEATURE (20)..(20): X is A and G
XXXXXXXXXXXXXXXXXXXX

SEQ ID NO: 489 - protein, 21 aa, Artificial
  Completely synthesized peptide construct
  MISC_FEATURE (1)..(1): X is acetyl or propionyl group, D glycine or D alanine, cyclohexylalanine at amino terminus
  MISC_FEATURE (2)..(2): X is D and E for acidic amino acids
  MISC_FEATURE (3)..(3): X is A and G
  MISC_FEATURE (4)..(4): X is D and E for acidic amino acids
  MISC_FEATURE (5)..(5): X is A and G
  MISC_FEATURE (6)..(6): X is A and G
  MISC_FEATURE (7)..(7): X is K, R or H for basic amino acids
  MISC_FEATURE (8)..(8): X is A and G
  MISC_FEATURE (9)..(9): X is K, R or H for basic amino acids
  MISC_FEATURE (10)..(10): X is K, R or H for basic amino acids
  MISC_FEATURE (11)..(11): X is A and G
  MISC_FEATURE (12)..(12): X is A and G
  MISC_FEATURE (13)..(13): X is D and E for acidic amino acids
  MISC_FEATURE (14)..(14): X is K, R or H for basic amino acids
  MISC_FEATURE (15)..(15): X is A and G
  MISC_FEATURE (16)..(16): X is F or P
  MISC_FEATURE (17)..(17): X is F or P
  MISC_FEATURE (18)..(18): X is A and G
  MISC_FEATURE (19)..(19): X is F or P
  MISC_FEATURE (20)..(20): X is N or Q for amidated amino acids
  MISC_FEATURE (21)..(21): X is A and G
XXXXXXXXXXXXXXXXXXXXX

SEQ ID NO: 490 - protein, 20 aa, Artificial
  Completely synthesized peptide construct
GLDGAKGEAGAPGVKGESGS

SEQ ID NO: 491 - protein, 21 aa, Artificial
  Completely synthesized peptide construct
  MISC_FEATURE (1)..(1): X is A and G
  MISC_FEATURE (2)..(2): X is I, L or V
  MISC_FEATURE (3)..(3): X is D and E for acidic amino acids
  MISC_FEATURE (4)..(4): X is A and G
  MISC_FEATURE (5)..(5): X is A and G
  MISC_FEATURE (6)..(6): X is K, R or H for basic amino acids
  MISC_FEATURE (7)..(7): X is A and G
  MISC_FEATURE (8)..(8): X is D and E for acidic amino acids
  MISC_FEATURE (9)..(9): X is A and G
  MISC_FEATURE (10)..(10): X is A and G
  MISC_FEATURE (11)..(11): X is A and G
  MISC_FEATURE (12)..(12): X is F or P
  MISC_FEATURE (13)..(13): X is A and G
  MISC_FEATURE (14)..(14): X is I, L or V
  MISC_FEATURE (15)..(15): X is K, R or H for basic amino acids
  MISC_FEATURE (16)..(16): X is A and G
  MISC_FEATURE (17)..(17): X is D and E for acidic amino acids
  MISC_FEATURE (18)..(18): X is T or S
  MISC_FEATURE (19)..(19): X is A and G
  MISC_FEATURE (20)..(20): X is A and G
  MISC_FEATURE (21)..(21): X is T or S
XXXXXXXXXXXXXXXXXXXXX

SEQ ID NO: 492 - protein, 21 aa, Artificial
  Completely synthesized peptide construct
  MISC_FEATURE (1)..(1): X is acetyl or propionyl group, D glycine or D alanine, cyclohexylalanine at amino terminus
  MISC_FEATURE (2)..(2): X is A and G
  MISC_FEATURE (3)..(3): X is I, L or V
  MISC_FEATURE (4)..(4): X is D and E for acidic amino acids
  MISC_FEATURE (5)..(5): X is A and G
  MISC_FEATURE (6)..(6): X is A and G
  MISC_FEATURE (7)..(7): X is K, R or H for basic amino acids
  MISC_FEATURE (8)..(8): X is A and G
  MISC_FEATURE (9)..(9): X is D and E for acidic amino acids
  MISC_FEATURE (10)..(10): X is A and G
  MISC_FEATURE (11)..(11): X is A and G
  MISC_FEATURE (12)..(12): X is A and G
  MISC_FEATURE (13)..(13): X is F or P
  MISC_FEATURE (14)..(14): X is A and G
  MISC_FEATURE (15)..(15): X is I, L or V
  MISC_FEATURE (16)..(16): X is K, R or H for basic amino acids
  MISC_FEATURE (17)..(17): X is A and G
  MISC_FEATURE (18)..(18): X is D and E for acidic amino acids
  MISC_FEATURE (19)..(19): X is T or S
  MISC_FEATURE (20)..(20): X is A and G
  MISC_FEATURE (21)..(21): X is T or S
XXXXXXXXXXXXXXXXXXXXX

SEQ ID NO: 493 - protein, 19 aa, Artificial
  Completely synthesized peptide construct
  MISC_FEATURE (1)..(1): X is A and G
  MISC_FEATURE (2)..(2): X is GabaX for X2X3 or X3X2 or X2X3 or X3X2 or X3X3 or X2X2
  MISC_FEATURE (3)..(3): X is A and G
  MISC_FEATURE (4)..(4): X is A and G
  MISC_FEATURE (5)..(5): X is K, R or H for basic amino acids
  MISC_FEATURE (6)..(6): X is A and G
  MISC_FEATURE (7)..(7): X is D and E for acidic amino acids
  MISC_FEATURE (8)..(8): X is A and G
  MISC_FEATURE (9)..(9): X is A and G
  MISC_FEATURE (10)..(10): X is A and G
  MISC_FEATURE (11)..(11): X is F or P
  MISC_FEATURE (12)..(12): X is A and G
  MISC_FEATURE (13)..(13): X is I, L or V
  MISC_FEATURE (14)..(14): X is K, R or H for basic amino acids
  MISC_FEATURE (15)..(15): X is A and G
  MISC_FEATURE (16)..(16): X is D and E for acidic amino acids
  MISC_FEATURE (17)..(17): X is T or S
  MISC_FEATURE (18)..(18): X is A and G
  MISC_FEATURE (19)..(19): X is T or S
XXXXXXXXXXXXXXXXXXX

SEQ ID NO: 494 - protein, 20 aa, Artificial
  Completely synthesized peptide construct
  MISC_FEATURE (1)..(1): X is acetyl or propionyl group, D glycine or D alanine, cyclohexylalanine at amino terminus
  MISC_FEATURE (2)..(2): X is A and G
  MISC_FEATURE (3)..(3): X is GabaX for X2X3 or X3X2 or X2X3 or X3X2 or X3X3 or X2X2
  MISC_FEATURE (4)..(4): X is A and G
  MISC_FEATURE (5)..(5): X is A and G
  MISC_FEATURE (6)..(6): X is K, R or H for basic amino acids
  MISC_FEATURE (7)..(7): X is A and G
  MISC_FEATURE (8)..(8): X is D and E for acidic amino acids
  MISC_FEATURE (9)..(9): X is A and G
  MISC_FEATURE (10)..(10): X is A and G
  MISC_FEATURE (11)..(11): X is A and G
  MISC_FEATURE (12)..(12): X is F or P
  MISC_FEATURE (13)..(13): X is A and G
  MISC_FEATURE (14)..(14): X is I, L or V
  MISC_FEATURE (15)..(15): X is K, R or H for basic amino acids
  MISC_FEATURE (16)..(16): X is A and G
  MISC_FEATURE (17)..(17): X is D and E for acidic amino acids
  MISC_FEATURE (18)..(18): X is T or S
  MISC_FEATURE (19)..(19): X is A and G
  MISC_FEATURE (20)..(20): X is T or S
XXXXXXXXXXXXXXXXXXXX

SEQ ID NO: 495 - protein, 20 aa, Artificial
  Completely synthesized peptide construct
ERGAAGIAGDKGDRGDVGEK

SEQ ID NO: 496 - protein, 20 aa, Artificial
  Completely synthesized peptide construct
  MISC_FEATURE (1)..(1): X is D and E for acidic amino acids
  MISC_FEATURE (2)..(2): X is K, R or H for basic amino acids
  MISC_FEATURE (3)..(3): X is A and G
  MISC_FEATURE (4)..(4): X is A and G
  MISC_FEATURE (5)..(5): X is A and G
  MISC_FEATURE (6)..(6): X is A and G
  MISC_FEATURE (7)..(7): X is I, L or V
  MISC_FEATURE (8)..(8): X is A and G
  MISC_FEATURE (9)..(9): X is A and G
  MISC_FEATURE (10)..(10): X is D and E for acidic amino acids
  MISC_FEATURE (11)..(11): X is K, R or H for basic amino acids
  MISC_FEATURE (12)..(12): X is A and G
  MISC_FEATURE (13)..(13): X is D and E for acidic amino acids
  MISC_FEATURE (14)..(14): A is K, R or H for basic amino acids
  MISC_FEATURE (15)..(15): X is A and G
  MISC_FEATURE (16)..(16): X is D and E for acidic amino acids
  MISC_FEATURE (17)..(17): X is I, L or V
  MISC_FEATURE (18)..(18): X is A and G
  MISC_FEATURE (19)..(19): X is D and E for acidic amino acids
  MISC_FEATURE (20)..(20): X is K, R or H for basic amino acids
XXXXXXXXXXXXXXXXXXXX

SEQ ID NO: 497 - protein, 21 aa, Artificial
  Completely synthesized peptide construct
  MISC_FEATURE (1)..(1): X is acetyl or propionyl group, D glycine or D alanine, cyclohexylalanine at amino terminus
  MISC_FEATURE (2)..(2): X is D and E for acidic amino acids
  MISC_FEATURE (3)..(3): X is K, R or H for basic amino acids
  MISC_FEATURE (4)..(4): X is A and G
  MISC_FEATURE (5)..(5): X is A and G
  MISC_FEATURE (6)..(6): X is A and G
  MISC_FEATURE (7)..(7): X is A and G
  MISC_FEATURE (8)..(8): X is I, L or V
  MISC_FEATURE (9)..(9): X is A and G
  MISC_FEATURE (10)..(10): X is A and G
  MISC_FEATURE (11)..(11): X is D and E for acidic amino acids
  MISC_FEATURE (12)..(12): X is K, R or H for basic amino acids
  MISC_FEATURE (13)..(13): X is D and E for acidic amino acids
  MISC_FEATURE (14)..(14): X is K, R or H for basic amino acids
  MISC_FEATURE (15)..(15): X is A and G
  MISC_FEATURE (16)..(16): X is D and E for acidic amino acids
  MISC_FEATURE (17)..(17): X is I, L or V
  MISC_FEATURE (18)..(18): X is A and G
  MISC_FEATURE (19)..(19): X is A and G
  MISC_FEATURE (20)..(20): X is D and E for acidic amino acids
  MISC_FEATURE (21)..(21): X is K, R or H for basic amino acids
XXXXXXXXXXXXXXXXXXXXX

SEQ ID NO: 498 - protein, 19 aa, Artificial
  Completely synthesized peptide construct
  MISC_FEATURE (1)..(1): X is D and E for acidic amino acids
  MISC_FEATURE (2)..(2): X is K, R or H for basic amino acids
  MISC_FEATURE (3)..(3): X is A and G
  MISC_FEATURE (4)..(4): X is A and G
  MISC_FEATURE (5)..(5): X is A and G
  MISC_FEATURE (6)..(6): X is A and G
  MISC_FEATURE (7)..(7): X is I, L or V
  MISC_FEATURE (8)..(8): X is A and G
  MISC_FEATURE (9)..(9): X is A and G
  MISC_FEATURE (10)..(10): X is D and E for acidic amino acids
  MISC_FEATURE (11)..(11): X is K, R or H for basic amino acids
  MISC_FEATURE (12)..(12): X is A and G
  MISC_FEATURE (13)..(13): X is D and E for acidic amino acids
  MISC_FEATURE (14)..(14): X is K. R or H for basic amino acids
  MISC_FEATURE (15)..(15): X is A and G
  MISC_FEATURE (16)..(16): X is GabaX for X2X3 or X3X2 or X2X3 or X3X2 or X3X3 or X2X2
  MISC_FEATURE (17)..(17): X is A and G
  MISC_FEATURE (18)..(18): X is D and E for acidic amino acids
  MISC_FEATURE (19)..(19): X is K, R or H for basic amino acids
XXXXXXXXXXXXXXXXXXX

SEQ ID NO: 499 - protein, 20 aa, Artificial
  Completely synthesized peptide construct
  MISC_FEATURE (1)..(1): X is acetyl or propionyl group, D glycine or D alanine, cyclohexylalanine at amino terminus
  MISC_FEATURE (2)..(2): X is D and E for acidic amino acids
  MISC_FEATURE (3)..(3): X is K, R or H for basic amino acids
  MISC_FEATURE (4)..(4): X is A and G
  MISC_FEATURE (5)..(5): X is A and G
  MISC_FEATURE (6)..(6): X is A and G
  MISC_FEATURE (7)..(7): X is A and G
  MISC_FEATURE (8)..(8): X is I, L or V
  MISC_FEATURE (9)..(9): X is A and G
  MISC_FEATURE (10)..(10): X is A and G
  MISC_FEATURE (11)..(11): X is D and E for acidic amino acids
  MISC_FEATURE (12)..(12): X is K, R or H for basic amino acids
  MISC_FEATURE (13)..(13): X is A and G
  MISC_FEATURE (14)..(14): X is D and E for acidic amino acids
  MISC_FEATURE (15)..(15): X is K, R or H for basic amino acids
  MISC_FEATURE (16)..(16): X is A and G
  MISC_FEATURE (17)..(17): X is GabaX for X2X3 or X3X2 or X2X3 or X3X2 or X3X3 or X2X2
  MISC_FEATURE (18)..(18): X is A and G
  MISC_FEATURE (19)..(19): X is D and E for acidic amino acids
  MISC_FEATURE (20)..(20): X is K, R or H for basic amino acids
XXXXXXXXXXXXXXXXXXXX

SEQ ID NO: 500 - protein, 7 aa, Artificial
  Completely synthesized peptide construct
SLAYGLR

SEQ ID NO: 501 - protein, 7 aa, Artificial
  Completely synthesized peptide construct
  MISC_FEATURE (1)..(1): X is T or S
  MISC_FEATURE (2)..(2): X is I, L or V
  MISC_FEATURE (3)..(3): X is A and G
  MISC_FEATURE (4)..(4): X is F, W or Y for aromatic amino acids
  MISC_FEATURE (5)..(5): X is A and G
  MISC_FEATURE (6)..(6): X is I, L or V
  MISC_FEATURE (7)..(7): X is K, R or H for basic amino acids
XXXXXXX

SEQ ID NO: 502 - protein, 8 aa, Artificial
  Completely synthesized peptide construct
  MISC_FEATURE (1)..(1): X is acetyl or propionyl group, D glycine or D alanine, cyclohexylalanine at amino terminus
  MISC_FEATURE (2)..(2): X is T or S
  MISC_FEATURE (3)..(3): X is I, L or V
  MISC_FEATURE (4)..(4): X is A and G
  MISC_FEATURE (5)..(5): X is F, W or Y for aromatic amino acids
  MISC_FEATURE (6)..(6): X is A and G
  MISC_FEATURE (7)..(7): X is I, L or V
  MISC_FEATURE (8)..(8): X is K, R or H for basic amino acids
XXXXXXXX

SEQ ID NO: 503 - protein, 15 aa, Artificial
  Completely synthesized peptide construct
QKRAAYKQYGHAAFE

SEQ ID NO: 504 - protein, 15 aa, Artificial
  Completely synthesized peptide construct
  MISC_FEATURE (1)..(1): X is N or Q for amidated amino acids
  MISC_FEATURE (2)..(2): X is K, R or H for basic amino acids
  MISC_FEATURE (3)..(3): X is K, R or H for basic amino acids
  MISC_FEATURE (4)..(4): X is A and G
  MISC_FEATURE (5)..(5): X is A and G
  MISC_FEATURE (6)..(6): X is F, W or Y for aromatic amino acids
  MISC_FEATURE (7)..(7): X is K, R or H for basic amino acids
  MISC_FEATURE (8)..(8): X is N or Q for amidated amino acids
  MISC_FEATURE (9)..(9): X is F, W or Y for aromatic amino acids
  MISC_FEATURE (10)..(10): X is A and G
  MISC_FEATURE (11)..(11): X is K, R or H for basic amino acids
  MISC_FEATURE (12)..(12): X is A and G
  MISC_FEATURE (13)..(13): X is A and G
  MISC_FEATURE (14)..(14): X is F or P
  MISC_FEATURE (15)..(15): X is D and E for acidic amino acids
XXXXXXXXXXXXXXX

SEQ ID NO: 505 - protein, 16 aa, Artificial
  Completely synthesized peptide construct
  MISC_FEATURE (1)..(1): X is aceytl or propionyl group, D glycine or D alanine, cyclohexylalanine at amino terminus
  MISC_FEATURE (2)..(2): X is N or Q for amidated amino acids
  MISC_FEATURE (3)..(3): X is K, R or H for basic amino acids
  MISC_FEATURE (4)..(4): X is K, R or H for basic amino acids
  MISC_FEATURE (5)..(5): X A and G
  MISC_FEATURE (6)..(6): X A and G
  MISC_FEATURE (7)..(7): X is F, W or Y for aromatic amino acids
  MISC_FEATURE (8)..(8): X is K, R or H for basic amino acids
  MISC_FEATURE (9)..(9): X is N or Q for amidated amino acids
  MISC_FEATURE (10)..(10): X is F, W or Y for aromatic amino acids
  MISC_FEATURE (11)..(11): X is A and G
  MISC_FEATURE (12)..(12): X is K, R or H for basic amino acids
  MISC_FEATURE (13)..(13): X is A and G
  MISC_FEATURE (14)..(14): X is A and G
  MISC_FEATURE (15)..(15): X is F or P
  MISC_FEATURE (16)..(16): X is D and E for acidic amino acids
XXXXXXXXXXXXXXXX

SEQ ID NO: 506 - protein, 14 aa, Artificial
  Completely synthesized peptide construct
ERAAYDQYGHAAFE

SEQ ID NO: 507 - protein, 14 aa, Artificial
  Completely synthesized peptide construct
  MISC_FEATURE (1)..(1): X is D and E for acidic amino acids
  MISC_FEATURE (2)..(2): X is K, R or H for basic amino acids
  MISC_FEATURE (3)..(3): X is A and G
  MISC_FEATURE (4)..(4): X is A and G
  MISC_FEATURE (5)..(5): X is F, W or Y for aromatic amino acids
  MISC_FEATURE (6)..(6): X is D and E for acidic amino acids
  MISC_FEATURE (7)..(7): X is N or Q for amidated amino acids
  MISC_FEATURE (8)..(8): X is F, W or Y for aromatic amino acids
  MISC_FEATURE (9)..(9): X is A and G
  MISC_FEATURE (10)..(10): X is K, R or H for basic amino acids
  MISC_FEATURE (11)..(11): X is A and G
  MISC_FEATURE (12)..(12): X is A and G
  MISC_FEATURE (13)..(13): X is F or P
  MISC_FEATURE (14)..(14): X is D and E for acidic amino acids
XXXXXXXXXXXXXX

SEQ ID NO: 508 - protein, 15 aa, Artificial
  Completely synthesized peptide construct
  MISC_FEATURE (1)..(1): X is acetyl or propionyl group, D glycine or D alanine, cyclohexylalanine at amino terminus
  MISC_FEATURE (2)..(2): X is D and E for acidic amino acids
  MISC_FEATURE (3)..(3): X is K, R or H for basic amino acids
  MISC_FEATURE (4)..(4): X is A and G
  MISC_FEATURE (5)..(5): X is A and G
  MISC_FEATURE (6)..(6): X is F, W or Y for aromatic amino acids
  MISC_FEATURE (7)..(7): X is D and E for acidic amino acids
  MISC_FEATURE (8)..(8): X is N or Q for amidated amino acids
  MISC_FEATURE (9)..(9): X is F, W or Y for aromatic amino acids
  MISC_FEATURE (10)..(10): X is A and G
  MISC_FEATURE (11)..(11): X is K, R or H for basic amino acids
  MISC_FEATURE (12)..(12): X is A and G
  MISC_FEATURE (13)..(13): X is A and G
  MISC_FEATURE (14)..(14): X is F or P
  MISC_FEATURE (15)..(15): X is A and G
XXXXXXXXXXXXXXX

SEQ ID NO: 509 - protein, 17 aa, Artificial
  Completely synthesized peptide construct
SVKLSIAVKNKAEFHQS

SEQ ID NO: 510 - protein, 17 aa, Artificial
  Completely synthesized peptide construct
  MISC_FEATURE (1)..(1): X is T or S
  MISC_FEATURE (2)..(2): X is I, L or V
  MISC_FEATURE (3)..(3): X is K, R or H for basic amino acids
  MISC_FEATURE (4)..(4): X is I, L or V
  MISC_FEATURE (5)..(5): X is T or S
  MISC_FEATURE (6)..(6): X is I, L or V
  MISC_FEATURE (7)..(7): X is A and G
  MISC_FEATURE (8)..(8): X is I, L or V
  MISC_FEATURE (9)..(9): X is K, R or H for basic amino acids
  MISC_FEATURE (10)..(10): X is N or Q for amidated amino acids
  MISC_FEATURE (11)..(11): X is K, R or H for basic amino acids
  MISC_FEATURE (12)..(12): X is A and G
  MISC_FEATURE (13)..(13): X is D and E for acidic amino acids
  MISC_FEATURE (14)..(14): X is F or P
  MISC_FEATURE (15)..(15): X is K, R or H for basic amino acids
  MISC_FEATURE (16)..(16): X is N or Q for amidated amino acids
  MISC_FEATURE (17)..(17): X is T or S
XXXXXXXXXXXXXXXXX

SEQ ID NO: 511 - protein, 18 aa, Artificial
  Completely synthesized peptide construct
  MISC_FEATURE (1)..(1): X is acetyl or propionyl group, D glycine or D alanine, cyclohexylalanine at amino terminus
  MISC_FEATURE (2)..(2): X is T or S
  MISC_FEATURE (3)..(3): X is I, L or V
  MISC_FEATURE (4)..(4): X is K, R or H for basic amino acids
  MISC_FEATURE (5)..(5): X is I, L or V
  MISC_FEATURE (6)..(6): X is T or S
  MISC_FEATURE (7)..(7): X is I, L or V
  MISC_FEATURE (8)..(8): X is A and G
  MISC_FEATURE (9)..(9): X is I, L or V
  MISC_FEATURE (10)..(10): X is K, R or H for basic amino acids
  MISC_FEATURE (11)..(11): X is N or Q for amidated amino acids
  MISC_FEATURE (12)..(12): X is K, R or H for basic amino acids
  MISC_FEATURE (13)..(13): X is A and G
  MISC_FEATURE (14)..(14): X is D and E for acidic amino acids
  MISC_FEATURE (15)..(15): X is F or P
  MISC_FEATURE (16)..(16): X is K, R or H for basic amino acids
  MISC_FEATURE (17)..(17): X is N or Q for amidated amino acids
  MISC_FEATURE (18)..(18): X is T or S
XXXXXXXXXXXXXXXXXX

SEQ ID NO: 512 - protein, 17 aa, Artificial
  Completely synthesized peptide construct
NVREGIAFRPASKTFTV

SEQ ID NO: 513 - protein, 17 aa, Artificial
  Completely synthesized peptide construct
  MISC_FEATURE (1)..(1): X is N or Q for amidated amino acids
  MISC_FEATURE (2)..(2): X is I, L or V
  MISC_FEATURE (3)..(3): X is K, R or H for basic amino acids
  MISC_FEATURE (4)..(4): X is D and E for acidic amino acids
  MISC_FEATURE (5)..(5): X is A and G
  MISC_FEATURE (6)..(5): X is I, L or V
  misc_feature (6)..(6): Xaa can be any naturally occurring amino acid
  MISC_FEATURE (7)..(7): X is A and G
  MISC_FEATURE (8)..(8): X is F or P
  MISC_FEATURE (9)..(9): X is K, R or H for basic amino acids
  MISC_FEATURE (10)..(10): X is F or P
  MISC_FEATURE (11)..(11): X is A and G
  MISC_FEATURE (12)..(12): X is T or S
  MISC_FEATURE (13)..(13): X is K, R or H for basic amino acids
  MISC_FEATURE (14)..(14): X is T or S
  MISC_FEATURE (15)..(15): X is F or P
  MISC_FEATURE (16)..(16): X is T or S
  MISC_FEATURE (17)..(17): X is I, L or V
XXXXXXXXXXXXXXXXX

SEQ ID NO: 514 - protein, 18 aa, Artificial
  Completely synthesized peptide construct
  MISC_FEATURE (1)..(1): X is aceytl or propionyl group, D glycine or D alanine, cyclohexylalanine at amino terminus
  MISC_FEATURE (2)..(2): X is N or Q for amidated amino acids
  MISC_FEATURE (3)..(3): X is I, L or V
  MISC_FEATURE (4)..(4): X is K, R or H for basic amino acids
  MISC_FEATURE (5)..(5): X is D and E for acidic amino acids
  MISC_FEATURE (6)..(6): X is A and G
  MISC_FEATURE (7)..(7): X is I, L or V
  MISC_FEATURE (8)..(8): X is A and G
  MISC_FEATURE (9)..(9): X is F or P
  MISC_FEATURE (10)..(10): X is K, R or H for basic amino acids
  MISC_FEATURE (11)..(11): X is F or P
  MISC_FEATURE (12)..(12): X is A and G
  MISC_FEATURE (13)..(13): X is T or S
  MISC_FEATURE (14)..(14): X is K, R or H for basic amino acids
  MISC_FEATURE (15)..(15): X is T or S
  MISC_FEATURE (16)..(16): X is F or P
  MISC_FEATURE (17)..(17): X is T or S
  MISC_FEATURE (18)..(18): X is I, L or V
XXXXXXXXXXXXXXXXXX

SEQ ID NO: 515 - protein, 14 aa, Artificial
  Completely synthesized peptide construct
  misc_feature (2)..(2): Xaa can be any naturally occurring amino acid
  misc_feature (9)..(9): Xaa can be any naturally occurring amino acid
EXIKFAAAXREGED

SEQ ID NO: 516 - protein, 14 aa, Artificial
  Completely synthesized peptide construct
  MISC_FEATURE (1)..(1): X is D and E for acidic amino acids
  MISC_FEATURE (2)..(2): X is A and G; D and E for acidic amino acids; I, L or V; K, R or H for basic amino acids; C or S; F, W or Y for aromatic amino acids; F or P; M or Nle (Norleucine); N or Q for amidated amino acids; and T or S
  MISC_FEATURE (3)..(3): X is I, L or V
  MISC_FEATURE (4)..(4): X is K, R or H for basic amino acids
  MISC_FEATURE (5)..(5): X is F or P
  MISC_FEATURE (6)..(6): X is A and G
  MISC_FEATURE (7)..(7): X is A and G
  MISC_FEATURE (8)..(8): X is A and G
  MISC_FEATURE (9)..(9): X is
  MISC_FEATURE (10)..(10): X is K, R or H for basic amino acids
  MISC_FEATURE (11)..(11): X is D and E for acidic amino acids
  MISC_FEATURE (12)..(12): X is A and G
  MISC_FEATURE (13)..(13): X is D and E for acidic amino acids
  MISC_FEATURE (14)..(14): X is D and E for acidic amino acids
XXXXXXXXXXXXXX

SEQ ID NO: 517 - protein, 15 aa, Artificial
  Completely synthesized peptide construct
  MISC_FEATURE (1)..(1): X is acetyl or propionyl group, D glycine or D alanine, cyclohexylalanine at amino terminus
  MISC_FEATURE (2)..(2): X is D and E for acidic amino acids
  MISC_FEATURE (3)..(3): X is A and G; D and E for acidic amino acids; I, L or V; K, R or H for basic amino acids; C or S; F, W or Y for aromatic amino acids; F or P; M or Nle (Norleucine); N or Q for amidated amino acids; and T or S
  MISC_FEATURE (4)..(4): X is I, L or V
  MISC_FEATURE (5)..(5): X is K, R or H for basic amino acids
  MISC_FEATURE (6)..(6): X is F or P
  MISC_FEATURE (7)..(7): X is A and G
  MISC_FEATURE (8)..(8): X is A and G
  MISC_FEATURE (9)..(9): X is A and G
  MISC_FEATURE (10)..(10): X is
  MISC_FEATURE (11)..(11): X is K, R or H for basic amino acids
  MISC_FEATURE (12)..(12): X is A and G
  MISC_FEATURE (13)..(13): X is A and G
  MISC_FEATURE (14)..(14): X is D and E for acidic amino acids
  MISC_FEATURE (15)..(15): X is D and E for acidic amino acids
XXXXXXXXXXXXXXX

SEQ ID NO: 518 - protein, 12 aa, Artificial
  Completely synthesized peptide construct
  MISC_FEATURE (1)..(1): X is GabaX for X2X3 or X3X2 or X2X3 or X3X2 or X3X3 or X2X2
  MISC_FEATURE (2)..(2): X is K, R or H for basic amino acids
  MISC_FEATURE (3)..(3): X is F or P
  MISC_FEATURE (4)..(4): X is A and G
  MISC_FEATURE (5)..(5): X is A and G
  MISC_FEATURE (6)..(6): X is A and G
  MISC_FEATURE (7)..(6): X is A and G; D and E for acidic amino acids; I, L or V; K, R or H for basic amino acids; C or S; F, W or Y for aromatic amino acids; F or P; M or Nle (Norleucine); N or Q for amidated amino acids; and T or S
  misc_feature (7)..(7): Xaa can be any naturally occurring amino acid
  MISC_FEATURE (8)..(8): X is K, R or H for basic amino acids
  MISC_FEATURE (9)..(9): X is D and E for acidic amino acids
  MISC_FEATURE (10)..(10): X is A and G
  MISC_FEATURE (11)..(11): X is D and E for acidic amino acids
  MISC_FEATURE (12)..(12): X is D and E for acidic amino acids
XXXXXXXXXXXX

SEQ ID NO: 519 - protein, 12 aa, Artificial
  Completely synthesized peptide construct
  MISC_FEATURE (1)..(1): X is 5-aminopentanoic acid for replacement of 3 or 4 amino acids of X2 and X3
  MISC_FEATURE (2)..(2): X is K, R or H for basic amino acids
  MISC_FEATURE (3)..(3): X is F or P
  MISC_FEATURE (4)..(4): X is A and G
  MISC_FEATURE (5)..(5): X is A and G
  MISC_FEATURE (6)..(6): X is A and G
  MISC_FEATURE (7)..(6): X is A and G; D and E for acidic amino acids; I, L or V; K, R or H for basic amino acids; C or S; F, W or Y for aromatic amino acids; F or P; M or Nle (Norleucine); N or Q for amidated amino acids; and T or S
  misc_feature (7)..(7): Xaa can be any naturally occurring amino acid
  MISC_FEATURE (8)..(8): X is K, R or H for basic amino acids
  MISC_FEATURE (9)..(9): X is D and E for acidic amino acids
  MISC_FEATURE (9)..(9): X is D and E for acidic amino acids
  MISC_FEATURE (10)..(10): X is A and G
  MISC_FEATURE (11)..(11): X is D and E for acidic amino acids
  MISC_FEATURE (12)..(12): X is D and E for acidic amino acids
XXXXXXXXXXXX

SEQ ID NO: 520 - protein, 11 aa, Artificial
  Completely synthesized peptide construct
  MISC_FEATURE (1)..(1): X is Gaba2 for X2X3 or X3X2 or X2X3 or X3X2 or X3X3 or X2X2
  MISC_FEATURE (2)..(2): X is K, R or H for basic amino acids
  MISC_FEATURE (3)..(3): X is F or P
  MISC_FEATURE (4)..(4): X is A and G
  MISC_FEATURE (5)..(5): X is A and G
  MISC_FEATURE (6)..(6): X is A and G
  MISC_FEATURE (7)..(7): X is A and G; D and E for acidic amino acids; I, L or V; K, R or H for basic amino acids; C or S; F, W or Y for aromatic amino acids; F or P; M or Nle (Norleucine); N or Q for amidated amino acids; and T or S
  MISC_FEATURE (8)..(8): X is K, R or H for basic amino acids
  MISC_FEATURE (9)..(9): X is D and E for acidic amino acids
  MISC_FEATURE (10)..(10): X is A and G
  MISC_FEATURE (11)..(11): GabaX for X2X3 or X3X2 or X2X3 or X3X2 or X3X3 or X2X2
XXXXXXXXXXX

SEQ ID NO: 521 - protein, 11 aa, Artificial
  Completely synthesized peptide construct
  MISC_FEATURE (1)..(1): X is 5-aminopentanoic acid for replacement fo 3 or 4 amino acids of X2 and X3
  MISC_FEATURE (2)..(2): X is K, R or H for basic amino acids
  MISC_FEATURE (3)..(3): X is F or P
  MISC_FEATURE (4)..(4): X is A and G
  MISC_FEATURE (5)..(5): X is A and G
  MISC_FEATURE (6)..(6): X is A and G
  MISC_FEATURE (7)..(6): X is A and G; D and E for acidic amino acids; I, L or V; K, R or H for basic amino acids; C or S; F, W or Y for aromatic amino acids; F or P; M or Nle (Norleucine); N or Q for amidated amino acids; and T or S
  misc_feature (7)..(7): Xaa can be any naturally occurring amino acid
  MISC_FEATURE (8)..(8): X is K, R or H for basic amino acids
  MISC_FEATURE (9)..(9): X is D and E for acidic amino acids
  MISC_FEATURE (10)..(10): X is A and G
  MISC_FEATURE (11)..(11): X is Gaba2 for X2X3 or X3X2 or X2X3 or X3X2 or X3X3 or X2X2
XXXXXXXXXXX

SEQ ID NO: 522 - protein, 13 aa, Artificial
  Completely synthesized peptide construct
  MISC_FEATURE (1)..(1): X is acetyl or propionyl group, D glycine or D alanine, cyclohexylalanine at amino terminus
  MISC_FEATURE (2)..(2): X is GabaX for X2X3 or X3X2 or X2X3 or X3X2 or X3X3 or X2X2
  MISC_FEATURE (3)..(3): X is K, R or H for basic amino acids
  MISC_FEATURE (4)..(4): X is F or P
  MISC_FEATURE (5)..(5): X is A and G
  MISC_FEATURE (6)..(6): X is A and G
  MISC_FEATURE (7)..(7): X is A and G
  MISC_FEATURE (8)..(8): X is
  MISC_FEATURE (9)..(9): X is K, R or H for basic amino acids
  MISC_FEATURE (10)..(10): X is D and E for acidic amino acids
  MISC_FEATURE (11)..(11): X is A and G
  MISC_FEATURE (12)..(12): X is D and E for acidic amino acids
  MISC_FEATURE (13)..(13): X is D and E for acidic amino acids
XXXXXXXXXXXXX

SEQ ID NO: 523 - protein, 13 aa, Artificial
  Completely synthesized peptide construct
  MISC_FEATURE (1)..(1): X is acetyl or propionyl group, D glycine or D alanine, cyclohexylalanie at amino terminus
  MISC_FEATURE (2)..(2): X is 5-aminipentanoic acid for replacement of 3 or 4 amino acids of X2 and X3
  MISC_FEATURE (3)..(3): X is K, R or H for basic amino acids
  MISC_FEATURE (4)..(4): X is F or P
  MISC_FEATURE (5)..(5): X is A and G
  MISC_FEATURE (6)..(6): X is A and G
  MISC_FEATURE (7)..(7): X is A and G
  MISC_FEATURE (8)..(8): X is
  MISC_FEATURE (9)..(9): X is K, R or H for basic amino acids
  MISC_FEATURE (10)..(10): X is D and E for acidic amino acids
  MISC_FEATURE (11)..(11): X is A and G
  MISC_FEATURE (12)..(12): X is D and E for acidic amino acids
  MISC_FEATURE (13)..(13): X is D and E for acidic amino acids
XXXXXXXXXXXXX

SEQ ID NO: 524 - protein, 12 aa, Artificial
  Completely synthesized peptide construct
  MISC_FEATURE (1)..(1): X is acetyl or propionyl group, D glycine or D alanine, cyclohexylalanine at amino terminus
  MISC_FEATURE (2)..(2): X is GabaX for X2X3 or X3X2 or X2X3 or X3X2 or X3X3 or X2X2
  MISC_FEATURE (3)..(3): X is K, R or H for basic amino acids
  MISC_FEATURE (4)..(4): X is F or P
  MISC_FEATURE (5)..(5): X is A and G
  MISC_FEATURE (6)..(6): X is A and G
  MISC_FEATURE (7)..(7): X is A and G
  MISC_FEATURE (8)..(8): X is
  MISC_FEATURE (9)..(9): X is K, R or H for basic amino acids
  MISC_FEATURE (10)..(10): X is D and E for acidic amino acids
  MISC_FEATURE (11)..(11): X is A and G
  MISC_FEATURE (12)..(12): X is GabaX for X2X3 or X3X2 or X2X3 or X3X2 or X3X3 or X2X2
XXXXXXXXXXXX

SEQ ID NO: 525 - protein, 12 aa, Artificial
  Completely synthesized peptide construct
  MISC_FEATURE (1)..(1): X is acetyl or propionyl group, D glycine or D alanine, cyclohexylalanine at amino terminus
  MISC_FEATURE (2)..(2): X is 5-aminopentanoic acid for replacement of 3 or 4 amino acids of X2 and X3
  MISC_FEATURE (3)..(3): X is K, R or H for basic amino acids
  MISC_FEATURE (4)..(4): X is F or P
  MISC_FEATURE (5)..(5): X is A and G
  MISC_FEATURE (6)..(6): X is A and G
  MISC_FEATURE (7)..(7): X is A and G
  MISC_FEATURE (8)..(8): X is
  MISC_FEATURE (9)..(9): X is K, R or H for basic amino acids
  MISC_FEATURE (10)..(10): X is D and E for acidic amino acids
  MISC_FEATURE (11)..(11): X is A and G
  MISC_FEATURE (12)..(12): X is GabaX for X2X3 or X3X2 or X2X3 or X3X2 or X3X3 or X2X2
XXXXXXXXXXXX

SEQ ID NO: 526 - protein, 13 aa, Artificial
  Completely synthesized peptide construct
PVVHFFKNIVTPR

SEQ ID NO: 527 - protein, 13 aa, Artificial
  Completely synthesized peptide construct
  MISC_FEATURE (1)..(1): X is F or P
  MISC_FEATURE (2)..(2): X is I, L or V
  MISC_FEATURE (3)..(3): X is I, L or V
  MISC_FEATURE (4)..(4): X is K, R or H for basic amino acids
  MISC_FEATURE (5)..(5): X is F or P
  MISC_FEATURE (6)..(6): X is F or P
  MISC_FEATURE (7)..(7): X is K, R or H for basic amino acids
  MISC_FEATURE (8)..(8): X is N or Q for amidated amino acids
  MISC_FEATURE (9)..(9): X is I, L or V
  MISC_FEATURE (10)..(10): X is I, L or V
  MISC_FEATURE (11)..(11): X is T or S
  MISC_FEATURE (12)..(12): X is F or P
  MISC_FEATURE (13)..(13): X is K, R or H for basic amino acids
XXXXXXXXXXXXX

SEQ ID NO: 528 - protein, 14 aa, Artificial
  Completely synthesized peptide construct
  MISC_FEATURE (1)..(1): X is acetyl or propionyl group, D glycine or D alanine, cyclohexylalanine at amino terminus
  MISC_FEATURE (2)..(2): X is F or P
  MISC_FEATURE (3)..(3): X is I, L or V
  MISC_FEATURE (4)..(4): X is I, L or V
  MISC_FEATURE (5)..(5): X is K, R or H for basic amino acids
  MISC_FEATURE (6)..(6): X is F or P
  MISC_FEATURE (7)..(7): X is F or P
  MISC_FEATURE (8)..(8): X is K, R or H for basic amino acids
  MISC_FEATURE (9)..(9): X is N or Q for amidated amino acids
  MISC_FEATURE (10)..(10): X is I, L or V
  MISC_FEATURE (11)..(11): X is I, L or V
  MISC_FEATURE (12)..(12): X is T or S
  MISC_FEATURE (13)..(13): X is F or P
  MISC_FEATURE (14)..(14): X is K, R or H for basic amino acids
XXXXXXXXXXXXXX

SEQ ID NO: 529 - protein, 12 aa, Artificial
  Completely synthesized peptide construct
  MISC_FEATURE (1)..(1): X is F or P
  MISC_FEATURE (2)..(2): X is GabaX for X2X3 or X3X2 or X2X3 or X3X2 or X3X3 or X2X2
  MISC_FEATURE (3)..(3): X is K, R or H for basic amino acids
  MISC_FEATURE (4)..(4): X is F or P
  MISC_FEATURE (5)..(5): X is F or P
  MISC_FEATURE (6)..(6): X is K, R or H for basic amino acids
  MISC_FEATURE (7)..(7): X is N or Q for amidated amino acids
  MISC_FEATURE (8)..(8): X is I, L or V
  MISC_FEATURE (9)..(9): X is I, L or V
  MISC_FEATURE (10)..(10): X is T or S
  MISC_FEATURE (11)..(11): X is F or P
  MISC_FEATURE (12)..(12): X is K, R or H for basic amino acids
XXXXXXXXXXXX

SEQ ID NO: 530 - protein, 13 aa, Artificial
  Completely synthesized peptide construct
  MISC_FEATURE (1)..(1): X is acetyl or propionyl group, D glycine or D alanine, cyclohexylalanine at amino terminus
  MISC_FEATURE (2)..(2): X is F or P
  MISC_FEATURE (3)..(3): X is GabaX for X2X3 or X3X2 or X2X3 or X3X2 or X3X3 or X2X2
  MISC_FEATURE (4)..(4): X is K, R or H for basic amino acids
  MISC_FEATURE (5)..(5): X is F or P
  MISC_FEATURE (6)..(6): X is F or P
  MISC_FEATURE (7)..(7): X is K, R or H for basic amino acids
  MISC_FEATURE (8)..(8): X is N or Q for amidated amino acids
  MISC_FEATURE (9)..(9): X is I, L or V
  MISC_FEATURE (10)..(10): X is I, L or V
  MISC_FEATURE (11)..(11): X is T or S
  MISC_FEATURE (12)..(12): X is F or P
  MISC_FEATURE (13)..(13): X is K, R or H for basic amino acids
XXXXXXXXXXXXX

SEQ ID NO: 531 - protein, 12 aa, Artificial
  Completely synthesized peptide construct
  MISC_FEATURE (1)..(1): X is F or P
  MISC_FEATURE (2)..(2): X is I, L or V
  MISC_FEATURE (3)..(3): X is I, L or V
  MISC_FEATURE (4)..(4): X is K, R or H for basic amino acids
  MISC_FEATURE (5)..(5): X is F or P
  MISC_FEATURE (6)..(6): X is F or P
  MISC_FEATURE (7)..(7): X is K, R or H for basic amino acids
  MISC_FEATURE (8)..(8): X is N or Q for amidated amino acids
  MISC_FEATURE (9)..(9): X is GabaX for X2X3 or X3X2 or X2X3 or X3X2 or X3X3 or X2X2
  MISC_FEATURE (10)..(10): X is T or S
  MISC_FEATURE (11)..(11): X is F or P
  MISC_FEATURE (12)..(12): X is K, R or H for basic amino acids
XXXXXXXXXXXX

SEQ ID NO: 532 - protein, 13 aa, Artificial
  Completely synthesized peptide construct
  MISC_FEATURE (1)..(1): X is acetyl or propionyl group, D glycine or D alanine, cyclohexylalanie at amino terminus
  MISC_FEATURE (2)..(2): X is F or P
  MISC_FEATURE (3)..(3): X is I, L or V
  MISC_FEATURE (4)..(4): X is I, L or V
  MISC_FEATURE (5)..(5): X is K, R or H for basic amino acids
  MISC_FEATURE (6)..(6): X is F or P
  MISC_FEATURE (7)..(7): X is F or P
  MISC_FEATURE (8)..(8): X is K, R or H for basic amino acids
  MISC_FEATURE (9)..(9): X is N or Q for amidated amino acids
  MISC_FEATURE (10)..(10): X is GabaX for X2X3 or X3X2 or X2X3 or X3X2 or X3X3 or X2X2
  MISC_FEATURE (11)..(11): X is T or S
  MISC_FEATURE (12)..(12): X is F or P
  MISC_FEATURE (13)..(13): X is K, R or H for basic amino acids
XXXXXXXXXXXXX

SEQ ID NO: 533 - protein, 13 aa, Artificial
  Completely synthesized peptide construct
  MISC_FEATURE (1)..(1): X is F or P
  MISC_FEATURE (2)..(2): X is I, L or V
  MISC_FEATURE (3)..(3): X is I, L or V
  MISC_FEATURE (4)..(4): X is K, R or H for basic amino acids
  MISC_FEATURE (5)..(5): X is F or P
  MISC_FEATURE (6)..(6): X is F or P
  MISC_FEATURE (7)..(7): X is N or Q for amidated amino acids
  MISC_FEATURE (8)..(8): X is I, L or V
  MISC_FEATURE (9)..(9): X is I, L or V
  MISC_FEATURE (10)..(10): X is T or S
  MISC_FEATURE (11)..(11): X is T or S
  MISC_FEATURE (12)..(12): X is F or P
  MISC_FEATURE (13)..(13): X is K, R or H for basic amino acids
XXXXXXXXXXXXX

SEQ ID NO: 534 - protein, 14 aa, Artificial
  Completely synthesized peptide construct
  MISC_FEATURE (1)..(1): X is acetyl or propionyl group, D glycine or D alanine, cyclodexylalanine at amino terminus
  MISC_FEATURE (2)..(2): X is F or P
  MISC_FEATURE (3)..(3): X is I, L or V
  MISC_FEATURE (4)..(4): X is I, L or V
  MISC_FEATURE (5)..(5): X is K, R or H for basic amino acids
  MISC_FEATURE (6)..(6): X is F or P
  MISC_FEATURE (7)..(7): X is F or P
  MISC_FEATURE (8)..(8): X is K, R or H for basic amino acids
  MISC_FEATURE (9)..(9): X is N or Q for amidated amino acids
  MISC_FEATURE (10)..(10): X is I, L or V
  MISC_FEATURE (11)..(11): X is I, L or V
  MISC_FEATURE (12)..(12): X is T or S
  MISC_FEATURE (13)..(13): X is F or P
  MISC_FEATURE (14)..(14): X is K, R or H for basic amino acids
XXXXXXXXXXXXXX

SEQ ID NO: 535 - protein, 11 aa, Artificial
  Completely synthesized peptide construct
  MISC_FEATURE (1)..(1): X is F or P
  MISC_FEATURE (2)..(2): X is GabaX for X2X3 or X3X2 or X2X3 or X3X2 or X3X3 or X2X2
  MISC_FEATURE (3)..(3): X is K, R or H for basic amino acids
  MISC_FEATURE (4)..(4): X is F or P
  MISC_FEATURE (5)..(5): X is F or P
  MISC_FEATURE (6)..(6): X is K, R or H for basic amino acids
  MISC_FEATURE (7)..(7): X is N or Q for amidated amino acids
  MISC_FEATURE (8)..(8): X is GabaX for X2X3 or X3X2 or X2X3 or X3X2 or X3X3 or X2X2
  MISC_FEATURE (9)..(9): X is T or S
  MISC_FEATURE (10)..(10): X is F or P
  MISC_FEATURE (11)..(11): X is K, R or H for basic amino acids
XXXXXXXXXXX

SEQ ID NO: 536 - protein, 12 aa, Artificial
  Completely synthesized peptide construct
  MISC_FEATURE (1)..(1): X is acetyl or propionyl group, D glycine or D alanine, cyclohexylalanine at amino terminus
  MISC_FEATURE (2)..(2): X is F or P
  MISC_FEATURE (3)..(3): X is GabaX for X2X3 or X3X2 or X2X3 or X3X2 or X3X3 or X2X2
  MISC_FEATURE (4)..(4): X is K, R or H for basic amino acids
  MISC_FEATURE (5)..(5): X is F or P
  MISC_FEATURE (6)..(6): X is F or P
  MISC_FEATURE (7)..(7): X is K, R or H for basic amino acids
  MISC_FEATURE (8)..(8): X is N or Q for amidated amino acids
  MISC_FEATURE (9)..(9): X is GabaX for X2X3 or X3X2 or X2X3 or X3X2 or X3X3 or X2X2
  MISC_FEATURE (10)..(10): X is T or S
  MISC_FEATURE (11)..(11): X is F or P
  MISC_FEATURE (12)..(12): X is K, R or H for basic amino acids
XXXXXXXXXXXX

SEQ ID NO: 537 - protein, 13 aa, Artificial
  Completely synthesized peptide construct
HSLGKWLGHPDKF

SEQ ID NO: 538 - protein, 13 aa, Artificial
  Completely synthesized peptide construct
  MISC_FEATURE (1)..(1): X is K, R or H for basic amino acids
  MISC_FEATURE (2)..(2): X is T or S
  MISC_FEATURE (3)..(3): X is I, L or V
  MISC_FEATURE (4)..(4): X is A and G
  MISC_FEATURE (5)..(5): X is K, R or H for basic amino acids
  MISC_FEATURE (6)..(6): X is F, W or Y for aromatic amino acids
  MISC_FEATURE (7)..(7): X is I, L or V
  MISC_FEATURE (8)..(8): X is A and G
  MISC_FEATURE (9)..(9): X is K, R or H for basic amino acids
  MISC_FEATURE (10)..(10): X is F or P
  MISC_FEATURE (11)..(11): X is D and E for acidic amino acids
  MISC_FEATURE (12)..(12): X is K, R or H for basic amino acids
  MISC_FEATURE (13)..(13): X is F or P
XXXXXXXXXXXXX

SEQ ID NO: 539 - protein, 14 aa, Artificial
  Completely synthesized peptide construct
  MISC_FEATURE (1)..(1): X is acetyl or propionyl group, D glycine or D alanine, cyclohexylalanine at amino terminus
  MISC_FEATURE (2)..(2): X is K, R or H for basic amino acids
  MISC_FEATURE (3)..(3): X is T or S
  MISC_FEATURE (4)..(4): X is I, L or V
  MISC_FEATURE (5)..(5): X is A and G
  MISC_FEATURE (6)..(6): X is K, R or H for basic amino acids
  MISC_FEATURE (7)..(7): X is F, W or Y for aromatic amino acids
  MISC_FEATURE (8)..(8): X is I, L or V
  MISC_FEATURE (9)..(9): X is A and G
  MISC_FEATURE (10)..(10): X is K, R or H for basic amino acids
  MISC_FEATURE (11)..(11): X is F or P
  MISC_FEATURE (12)..(12): X is D and E for acidic amino acids
  MISC_FEATURE (13)..(13): X is K, R or H for basic amino acids
  MISC_FEATURE (14)..(14): X is F or P
XXXXXXXXXXXXXX

SEQ ID NO: 540 - protein, 11 aa, Artificial
  Completely synthesized peptide construct
TEISFKLGQEF

SEQ ID NO: 541 - protein, 11 aa, Artificial
  Completely synthesized peptide construct
  MISC_FEATURE (1)..(1): X is T or S
  MISC_FEATURE (2)..(2): X is D and E for acidic amino acids
  MISC_FEATURE (3)..(3): X is I, L or V
  MISC_FEATURE (4)..(4): X is T or S
  MISC_FEATURE (5)..(5): X is F or P
  MISC_FEATURE (6)..(6): X is K, R or H for basic amino acids
  MISC_FEATURE (7)..(7): X is K, R or H for basic amino acids
  MISC_FEATURE (8)..(8): X is A and G
  MISC_FEATURE (9)..(9): X is N or Q for amidated amino acids
  MISC_FEATURE (10)..(10): X is D and E for acidic amino acids
  MISC_FEATURE (11)..(11): X is F or P
XXXXXXXXXXX

SEQ ID NO: 542 - protein, 10 aa, Artificial
  Completely synthesized peptide construct
  MISC_FEATURE (1)..(1): X is T or S
  MISC_FEATURE (2)..(2): X is GabaX for X2X3 or X3X2 or X2X3 or X3X2 or X3X3 or X2X2
  MISC_FEATURE (3)..(3): X is T or S
  MISC_FEATURE (4)..(4): X is F or P
  MISC_FEATURE (5)..(5): X is K, R or H for basic amino acids
  MISC_FEATURE (6)..(6): X is K, R or H for basic amino acids
  MISC_FEATURE (7)..(7): X is A and G
  MISC_FEATURE (8)..(8): X is N or Q for amidated amino acids
  MISC_FEATURE (9)..(9): X is D and E for acidic amino acids
  MISC_FEATURE (10)..(10): X is F or P
XXXXXXXXXX

SEQ ID NO: 543 - protein, 12 aa, Artificial
  Completely synthesized peptide construct
  MISC_FEATURE (1)..(1): X is acetyl or propionyl group, D glycine or D alanine, cyclohexylalanine at amino terminus
  MISC_FEATURE (2)..(2): X is T or S
  MISC_FEATURE (3)..(3): X is D and E for acidic amino acids
  MISC_FEATURE (4)..(4): X is I, L or V
  MISC_FEATURE (5)..(5): X is T or S
  MISC_FEATURE (6)..(6): X is F or P
  MISC_FEATURE (7)..(7): X is K, R or H for basic amino acids
  MISC_FEATURE (8)..(8): X is K, R or H for basic amino acids
  MISC_FEATURE (9)..(9): X is A and G
  MISC_FEATURE (10)..(10): X is N or Q for amidated amino acids
  MISC_FEATURE (11)..(11): X is D and E for acidic amino acids
  MISC_FEATURE (12)..(12): X is F or P
XXXXXXXXXXXX

SEQ ID NO: 544 - protein, 11 aa, Artificial
  Completely synthesized peptide construct
  MISC_FEATURE (1)..(1): X is acetyl or propionyl group, D glycine or D alanine, cyclohexylalanine at amino terminus
  MISC_FEATURE (2)..(2): X is T or S
  MISC_FEATURE (3)..(3): X is GabaX for X2X3 or X3X2 or X2X3 or X3X2 or X3X3 or X2X2
  MISC_FEATURE (4)..(4): X is T or S
  MISC_FEATURE (5)..(5): X is F or P
  MISC_FEATURE (6)..(6): X is K, R or H for basic amino acids
  MISC_FEATURE (7)..(7): X is K, R or H for basic amino acids
  MISC_FEATURE (8)..(8): X is A and G
  MISC_FEATURE (9)..(9): X is N or Q for amidated amino acids
  MISC_FEATURE (10)..(10): X is D and E for acidic amino acids
  MISC_FEATURE (11)..(11): X is F or P
XXXXXXXXXXX

SEQ ID NO: 545 - protein, 11 aa, Artificial
  Completely synthesized peptide construct
SLDGELKALFK

SEQ ID NO: 546 - protein, 11 aa, Artificial
  Completely synthesized peptide construct
  MISC_FEATURE (1)..(1): X is T or S
  MISC_FEATURE (2)..(2): X is I, L or V
  MISC_FEATURE (3)..(3): X is D and E for acidic amino acids
  MISC_FEATURE (4)..(4): X is A and G
  MISC_FEATURE (5)..(5): X is D and E for acidic amino acids
  MISC_FEATURE (6)..(6): X is I, L or V
  MISC_FEATURE (7)..(7): X is K, R or H for basic amino acids
  MISC_FEATURE (8)..(8): X is A and G
  MISC_FEATURE (9)..(9): X is I, L or V
  MISC_FEATURE (10)..(10): X is F or P
  MISC_FEATURE (11)..(11): X is K, R or H for basic amino acids
XXXXXXXXXXX

SEQ ID NO: 547 - protein, 10 aa, Artificial
  Completely synthesized peptide construct
  MISC_FEATURE (1)..(1): X is T or S
  MISC_FEATURE (2)..(2): X  is  GabaX for X2X3 or X3X2 or X2X3 or X3X2 or X3X3 or X2X2
  MISC_FEATURE (3)..(3): X is A and G
  MISC_FEATURE (4)..(4): X is D and E for acidic amino acids
  MISC_FEATURE (5)..(5): X is I, L or V
  MISC_FEATURE (6)..(6): X is K, R or H for basic amino acids
  MISC_FEATURE (7)..(7): X is A and G
  MISC_FEATURE (8)..(8): X is I, L or V
  MISC_FEATURE (9)..(9): X is F or P
  MISC_FEATURE (10)..(10): X is K, R or H for basic amino acids
XXXXXXXXXX

SEQ ID NO: 548 - protein, 10 aa, Artificial
  Completely synthesized peptide construct
  MISC_FEATURE (1)..(1): X is T or S
  MISC_FEATURE (2)..(2): X is I, L or V
  MISC_FEATURE (3)..(3): X is D and E for acidic amino acids
  MISC_FEATURE (4)..(4): X is A and G
  MISC_FEATURE (5)..(5): X is GabaX for X2X3 or X3X2 or X2X3 or X3X2 or X3X3 or X2X2
  MISC_FEATURE (6)..(6): X is K, R or H for basic amino acids
  MISC_FEATURE (7)..(7): X is A and G
  MISC_FEATURE (8)..(8): X is I, L or V
  MISC_FEATURE (9)..(9): X is F or P
  MISC_FEATURE (10)..(10): X is K, R or H for basic amino acids
XXXXXXXXXX

SEQ ID NO: 549 - protein, 9 aa, Artificial
  Completely synthesized peptide construct
  MISC_FEATURE (1)..(1): X is T or S
  MISC_FEATURE (2)..(2): X is GabaX for X2X3 or X3X2 or X2X3 or X3X2 or X3X3 or X2X2
  MISC_FEATURE (3)..(3): X is A and G
  MISC_FEATURE (4)..(4): X is GabaX for X2X3 or X3X2 or X2X3 or X3X2 or X3X3 or X2X2
  MISC_FEATURE (5)..(5): X is K, R or H for basic amino acids
  MISC_FEATURE (6)..(6): X is A and G
  MISC_FEATURE (7)..(7): X is I, L or V
  MISC_FEATURE (8)..(8): X is F or P
  MISC_FEATURE (9)..(9): X is K, R or H for basic amino acids
XXXXXXXXX

SEQ ID NO: 550 - protein, 12 aa, Artificial
  Completely synthesized peptide construct
  MISC_FEATURE (1)..(1): X is acetyl or proionyl group, D glycine or D alanine, cyclohexylalanine at amino terminus
  MISC_FEATURE (2)..(2): X is T or S
  MISC_FEATURE (3)..(3): X is I, L or V
  MISC_FEATURE (4)..(4): X is D and E for acidic amino acids
  MISC_FEATURE (5)..(5): X is A and G
  MISC_FEATURE (6)..(6): X is D and E for acidic amino acids
  MISC_FEATURE (7)..(7): X is I, L or V
  MISC_FEATURE (8)..(8): X is K, R or H for basic amino acids
  MISC_FEATURE (9)..(9): X is A and G
  MISC_FEATURE (10)..(10): X is I, L or V
  MISC_FEATURE (11)..(11): X is F or P
  MISC_FEATURE (12)..(12): X is K, R or H for basic amino acids
XXXXXXXXXXXX

SEQ ID NO: 551 - protein, 11 aa, Artificial
  Completely synthesized peptide construct
  MISC_FEATURE (1)..(1): X is aceytl or propionyl group, D glycine or D alanine, cyclohexylalanine at amino terminus
  MISC_FEATURE (2)..(2): X is T or S
  MISC_FEATURE (3)..(3): X is GabaX for X2X3 or X3X2 or X2X3 or X3X2 or X3X3 or X2X2
  MISC_FEATURE (4)..(4): X is A and G
  MISC_FEATURE (5)..(5): X is D and E for acidic amino acids
  MISC_FEATURE (6)..(6): X is I, L or V
  MISC_FEATURE (7)..(7): X is K, R or H for basic amino acids
  MISC_FEATURE (8)..(8): X is A and G
  MISC_FEATURE (9)..(9): X is I, L or V
  MISC_FEATURE (10)..(10): X is F or P
  MISC_FEATURE (11)..(11): X is K, R or H for basic amino acids
XXXXXXXXXXX

SEQ ID NO: 552 - protein, 11 aa, Artificial
  Completely synthesized peptide construct
  MISC_FEATURE (1)..(1): X is acetyl or propionyl group, D glycine or D alanine, cyclohexylalanine at amino terminus
  MISC_FEATURE (2)..(2): X is T or S
  MISC_FEATURE (3)..(3): X is I, L or V
  MISC_FEATURE (4)..(4): X is D and E for acidic amino acids
  MISC_FEATURE (5)..(5): X is A and G
  MISC_FEATURE (6)..(6): X is GabaX for X2X3 or X3X2 or X2X3 or X3X2 or X3X3 or X2X2
  MISC_FEATURE (7)..(7): X is K, R or H for basic amino acids
  MISC_FEATURE (8)..(8): X is A and G
  MISC_FEATURE (9)..(9): X is I, L or V
  MISC_FEATURE (10)..(10): X is F or P
  MISC_FEATURE (11)..(11): X is K, R or H for basic amino acids
XXXXXXXXXXX

SEQ ID NO: 553 - protein, 10 aa, Artificial
  Completely synthesized peptide construct
  MISC_FEATURE (1)..(1): X is aceytl or propionyl group, D glycine or D alanine, cyclohexylalanine at amino terminus
  MISC_FEATURE (2)..(2): X is T or S
  MISC_FEATURE (3)..(3): X is GabaX for X2X3 or X3X2 or X2X3 or X3X2 or X3X3 or X2X2
  MISC_FEATURE (4)..(4): X is A and G
  MISC_FEATURE (5)..(5): X is GabaX for X2X3 or X3X2 or X2X3 or X3X2 or X3X3 or X2X2
  MISC_FEATURE (6)..(6): X is K, R or H for basic amino acids
  MISC_FEATURE (7)..(7): X is A and G
  MISC_FEATURE (8)..(8): X is I, L or V
  MISC_FEATURE (9)..(9): X is F or P
  MISC_FEATURE (10)..(10): X is K, R or H for basic amino acids
XXXXXXXXXX

SEQ ID NO: 554 - protein, 7 aa, Artificial
  Completely synthesized peptide construct
FKNIVTP

SEQ ID NO: 555 - protein, 7 aa, Artificial
  Completely synthesized peptide construct
  MISC_FEATURE (1)..(1): X is F or P
  MISC_FEATURE (2)..(2): X is K, R or H for basic amino acids
  MISC_FEATURE (3)..(3): X is N or Q for amidated amino acids
  MISC_FEATURE (4)..(4): X is I, L or V
  MISC_FEATURE (5)..(5): X is I, L or V
  MISC_FEATURE (6)..(6): X is T or S
  MISC_FEATURE (7)..(7): X is F or P
XXXXXXX

SEQ ID NO: 556 - protein, 6 aa, Artificial
  Completely synthesized peptide construct
  MISC_FEATURE (1)..(1): X is F or P
  MISC_FEATURE (2)..(2): X is K, R or H for basic amino acids
  MISC_FEATURE (3)..(3): X is N or Q for amidated amino acids
  MISC_FEATURE (4)..(4): X is GabaX for X2X3 or X3X2 or X2X3 or X3X2 or X3X3 or X2X2
  MISC_FEATURE (5)..(5): X is T or S
  MISC_FEATURE (6)..(6): X is F or P
XXXXXX

SEQ ID NO: 557 - protein, 8 aa, Artificial
  Completely synthesized peptide construct
  MISC_FEATURE (1)..(1): X is acetyl or propionyl group, D glycine or D alanine, cyclohexylalanine at amino terminus
  MISC_FEATURE (2)..(2): X is F or P
  MISC_FEATURE (3)..(3): X is K, R or H for basic amino acids
  MISC_FEATURE (4)..(4): X is N or Q for amidated amino acids
  MISC_FEATURE (5)..(5): X is I, L or V
  MISC_FEATURE (6)..(6): X is I, L or V
  MISC_FEATURE (7)..(7): X is T or S
  MISC_FEATURE (8)..(8): X is F or P
XXXXXXXX

SEQ ID NO: 558 - protein, 7 aa, Artificial
  Completely synthesized peptide construct
  MISC_FEATURE (1)..(1): X is acetyl or propionyl group, D glycine or D alanine, cyclohexylalanine at amino terminus
  MISC_FEATURE (2)..(2): X is F or P
  MISC_FEATURE (3)..(3): X is K, R or H for basic amino acids
  MISC_FEATURE (4)..(4): X is N or Q for amidated amino acids
  MISC_FEATURE (5)..(5): X is GabaX for X2X3 or X3X2 or X2X3 or X3X2 or X3X3 or X2X2
  MISC_FEATURE (6)..(6): X is T or S
  MISC_FEATURE (7)..(7): X is F or P
XXXXXXX

SEQ ID NO: 559 - protein, 13 aa, Artificial
  Completely synthesized peptide construct
HSLGKWLGHPDKF

SEQ ID NO: 560 - protein, 14 aa, Artificial
  Completely synthesized peptide construct
NTWTTCQSIAFPSK

SEQ ID NO: 561 - protein, 14 aa, Artificial
  Completely synthesized peptide construct
  MISC_FEATURE (1)..(1): X is N or Q for amidated amino acids
  MISC_FEATURE (2)..(2): X is T or S
  MISC_FEATURE (3)..(3): X is F, W or Y for aromatic amino acids
  MISC_FEATURE (4)..(4): X is T or S
  MISC_FEATURE (5)..(5): X is T or S
  MISC_FEATURE (6)..(6): X is C or S
  MISC_FEATURE (7)..(7): X is N or Q for amidated amino acids
  MISC_FEATURE (8)..(8): X is M or Nle (Norleucine)
  MISC_FEATURE (9)..(9): X is I, L or V
  MISC_FEATURE (10)..(10): X is A and G
  MISC_FEATURE (11)..(11): X is F or P
  MISC_FEATURE (12)..(12): X is F or P
  MISC_FEATURE (13)..(13): X is T or S
  MISC_FEATURE (14)..(14): X is K, R or H for basic amino acids
XXXXXXXXXXXXXX

SEQ ID NO: 562 - protein, 15 aa, Artificial
  Completely synthesized peptide construct
  MISC_FEATURE (1)..(1): X is acetyl or propionyl group, D glycine or D alanine, cyclohexylalanine at amino terminus
  MISC_FEATURE (2)..(2): X is N or Q for amidated amino acids
  MISC_FEATURE (3)..(3): X is T or S
  MISC_FEATURE (4)..(4): X is F, W or Y for aromatic amino acids
  MISC_FEATURE (5)..(5): X is T or S
  MISC_FEATURE (6)..(6): X is T or S
  MISC_FEATURE (7)..(7): X is C or S
  MISC_FEATURE (8)..(8): X is N or Q for amidated amino acids
  MISC_FEATURE (9)..(9): X is T or S
  MISC_FEATURE (10)..(10): X is I, L or V
  MISC_FEATURE (11)..(11): X is A and G
  MISC_FEATURE (12)..(12): X is F or P
  MISC_FEATURE (13)..(13): X is F or P
  MISC_FEATURE (14)..(14): X is T or S
  MISC_FEATURE (15)..(15): X is K, R or H for basic amino acids
XXXXXXXXXXXXXXX

SEQ ID NO: 563 - protein, 18 aa, Artificial
  Completely synthesized peptide construct
IYFNTWTTCQSIAFPSKT

SEQ ID NO: 564 - protein, 18 aa, Artificial
  Completely synthesized peptide construct
  MISC_FEATURE (1)..(1): X is I, L or V
  MISC_FEATURE (2)..(2): X is F, W or Y for aromatic amino acids
  MISC_FEATURE (3)..(3): X is F, W or Y for aromatic amino acids
  MISC_FEATURE (4)..(4): X is N or Q for amidated amino acids
  MISC_FEATURE (5)..(5): X is T or S
  MISC_FEATURE (6)..(6): X is F, W or Y for aromatic amino acids
  MISC_FEATURE (7)..(7): X is T or S
  MISC_FEATURE (8)..(8): X is T or S
  MISC_FEATURE (9)..(9): X is C or S
  MISC_FEATURE (10)..(10): X is N or Q for amidated amino acids
  MISC_FEATURE (11)..(11): X is T or s
  MISC_FEATURE (12)..(12): X is I, L or V
  MISC_FEATURE (13)..(13): X is A and G
  MISC_FEATURE (14)..(14): X is F or P
  MISC_FEATURE (15)..(15): X is F or P
  MISC_FEATURE (16)..(16): X is T or S
  MISC_FEATURE (17)..(17): X is K, R or H for basic amino acids
  MISC_FEATURE (18)..(18): X is T or S
XXXXXXXXXXXXXXXXXX

SEQ ID NO: 565 - protein, 19 aa, Artificial
  Completely synthesized peptide construct
  MISC_FEATURE (1)..(1): X is acetyl or propionyl group, D glycine or D alanine, cyclohexylalanine at amino terminus
  MISC_FEATURE (2)..(2): X is I, L or V
  MISC_FEATURE (3)..(3): X is F, W or Y for aromatic amino acids
  MISC_FEATURE (4)..(4): X is F, W or Y or aromatic amino acids
  MISC_FEATURE (5)..(5): X is N or Q for amidated amino acids
  MISC_FEATURE (6)..(6): X is T or S
  MISC_FEATURE (7)..(7): X is F, W or Y for aromatic amino acids
  MISC_FEATURE (8)..(8): X is T or S
  MISC_FEATURE (9)..(9): X is T or S
  MISC_FEATURE (10)..(10): X is C or S
  MISC_FEATURE (11)..(11): X is N or Q for amidated amino acids
  MISC_FEATURE (12)..(12): X is T or S
  MISC_FEATURE (13)..(13): X is I, L or V
  MISC_FEATURE (14)..(14): X is A and G
  MISC_FEATURE (15)..(15): X is F or P
  MISC_FEATURE (16)..(16): X is F or P
  MISC_FEATURE (17)..(17): X is T or S
  MISC_FEATURE (18)..(18): X is K, R or H for basic amino acids
  MISC_FEATURE (19)..(19): X is T or S
XXXXXXXXXXXXXXXXXXX

SEQ ID NO: 566 - protein, 23 aa, Artificial
  Completely synthesized peptide construct
QKFSEHFSIHCCPPFTFLNSSKR

SEQ ID NO: 567 - protein, 23 aa, Artificial
  Completely synthesized peptide construct
  MISC_FEATURE (1)..(1): X is N or Q for amidated amino acids
  MISC_FEATURE (2)..(2): X is K, R or H for basic amino acids
  MISC_FEATURE (3)..(3): X is F, W or Y for aromatic amino acids
  MISC_FEATURE (4)..(4): X is T or S
  MISC_FEATURE (5)..(5): X is D and E for acidic amino acids
  MISC_FEATURE (6)..(6): X is K, R or H for basic amino acids
  MISC_FEATURE (7)..(7): X is F or P
  MISC_FEATURE (8)..(8): X is T or S
  MISC_FEATURE (9)..(9): X is I, L or V
  MISC_FEATURE (10)..(10): X is K, R or H for basic amino acids
  MISC_FEATURE (11)..(11): X is C or S
  MISC_FEATURE (12)..(12): X is C or S
  MISC_FEATURE (13)..(13): X is F or P
  MISC_FEATURE (14)..(14): X is F or P
  MISC_FEATURE (15)..(15): X is F, W or Y for aromatic amino acids
  MISC_FEATURE (16)..(16): X is T or S
  MISC_FEATURE (17)..(17): X is F, W or Y for aromatic amino acids
  MISC_FEATURE (18)..(18): X is I, L or V
  MISC_FEATURE (19)..(19): X is N or Q for amidated amino acids
  MISC_FEATURE (20)..(20): X is T or S
  MISC_FEATURE (21)..(21): X is T or S
  MISC_FEATURE (22)..(22): X is K, R or H for basic amino acids
  MISC_FEATURE (23)..(23): X is K, R or H for basic amino acids
XXXXXXXXXXXXXXXXXXXXXXX

SEQ ID NO: 568 - protein, 24 aa, Artificial
  Completely synthesized peptide construct
  MISC_FEATURE (1)..(1): X is acetyl or propionyl group, D glycine or D alanine, cyclohexylalanine at amino terminus
  MISC_FEATURE (2)..(2): X is N or Q for amidated amino acids
  MISC_FEATURE (3)..(3): X is K, R or H for basic amino acids
  MISC_FEATURE (4)..(4): X is F, W or Y for aromatic amino acids
  MISC_FEATURE (5)..(5): X is T or S
  MISC_FEATURE (6)..(6): X is D and E for acidic amino acids
  MISC_FEATURE (7)..(7): X is K, R or H for basic amino acids
  MISC_FEATURE (8)..(8): X is F or P
  MISC_FEATURE (9)..(9): X is T or S
  MISC_FEATURE (10)..(10): X is K, R or H for basic amino acids
  MISC_FEATURE (11)..(11): X is K, R or H for basic amino acids
  MISC_FEATURE (12)..(12): X is C or S
  MISC_FEATURE (13)..(13): X is C or S
  MISC_FEATURE (14)..(14): X is F or P
  MISC_FEATURE (15)..(15): X is F or P
  MISC_FEATURE (16)..(16): X is F, W or Y for aromatic amino acids
  MISC_FEATURE (17)..(17): X is T or S
  MISC_FEATURE (18)..(18): X is F, W or Y for aromatic amino acids
  MISC_FEATURE (19)..(19): X is I, L or V
  MISC_FEATURE (20)..(20): X is N or Q for amidated amino acids
  MISC_FEATURE (21)..(21): X is T or S
  MISC_FEATURE (22)..(22): X is T or S
  MISC_FEATURE (23)..(23): X is K, R or H for basic amino acids
  MISC_FEATURE (24)..(24): X is K, R or H for basic amino acids
XXXXXXXXXXXXXXXXXXXXXXXX

SEQ ID NO: 569 - protein, 20 aa, Artificial
  Completely synthesized peptide construct
GQFRVIGPRHPIRALVGDEV

SEQ ID NO: 570 - protein, 20 aa, Artificial
  Completely synthesized peptide construct
  MISC_FEATURE (1)..(1): X is A and G
  MISC_FEATURE (2)..(2): X is N or Q for amidated amino acids
  MISC_FEATURE (3)..(3): X is F, W or Y for aromatic amino acids
  MISC_FEATURE (4)..(4): X is K, R or H for basic amino acids
  MISC_FEATURE (5)..(5): X is I, L or V
  MISC_FEATURE (6)..(6): X is I, L or V
  MISC_FEATURE (7)..(7): X is A and G
  MISC_FEATURE (8)..(8): X is F or P
  MISC_FEATURE (9)..(9): X is K, R or H for basic amino acids
  MISC_FEATURE (10)..(10): X is K, R or H for basic amino acids
  MISC_FEATURE (11)..(11): X is F or P
  MISC_FEATURE (12)..(12): X is I, L or V
  MISC_FEATURE (13)..(13): X is K, R or H for basic amino acids
  MISC_FEATURE (14)..(14): X is A and G
  MISC_FEATURE (15)..(15): X is I, L or V
  MISC_FEATURE (16)..(16): X is I, L or V
  MISC_FEATURE (17)..(17): X is A and G
  MISC_FEATURE (18)..(18): X is D and E for acidic amino acids
  MISC_FEATURE (19)..(19): X is D and E for acidic amino acids
  MISC_FEATURE (20)..(20): X is I, L or V
XXXXXXXXXXXXXXXXXXXX

SEQ ID NO: 571 - protein, 20 aa, Artificial
  Completely synthesized peptide construct
  MISC_FEATURE (1)..(1): X is A and G
  MISC_FEATURE (2)..(2): X is N or Q for amidated amino acids
  MISC_FEATURE (3)..(3): X is F, W or Y for aromatic amino acids
  MISC_FEATURE (4)..(4): X is K, R or H for basic amino acids
  MISC_FEATURE (5)..(5): X is I, L or V
  MISC_FEATURE (6)..(6): X is I, L or V
  MISC_FEATURE (7)..(7): X is A and G
  MISC_FEATURE (8)..(8): X is F or P
  MISC_FEATURE (9)..(9): X is K, R or H for basic amino acids
  MISC_FEATURE (10)..(10): X is K, R or H for basic amino acids
  MISC_FEATURE (11)..(11): X is F or P
  MISC_FEATURE (12)..(12): X is I, L or V
  MISC_FEATURE (13)..(13): X is K, R or H for basic amino acids
  MISC_FEATURE (14)..(14): X is A and G
  MISC_FEATURE (15)..(15): X is I, L or V
  MISC_FEATURE (16)..(16): X is I, L or V
  MISC_FEATURE (17)..(17): X is A and G
  MISC_FEATURE (18)..(18): X is D and E for acidic amino acids
  MISC_FEATURE (19)..(19): X is D and E for acidic amino acids
  MISC_FEATURE (20)..(20): X is I, L or V
XXXXXXXXXXXXXXXXXXXX

SEQ ID NO: 572 - protein, 19 aa, Artificial
  Completely synthesized peptide construct
  MISC_FEATURE (1)..(1): X is A and G
  MISC_FEATURE (2)..(2): X is N or Q for amidated amino acids
  MISC_FEATURE (3)..(3): X is F, W or Y for aromatic amino acids
  MISC_FEATURE (4)..(4): X is K, R or H for basic amino acids
  MISC_FEATURE (5)..(5): X is GabaX for X2X3 or X3X2 or X2X3 or X3X2 or X3X3 or X2X2
  MISC_FEATURE (6)..(6): X is A and G
  MISC_FEATURE (7)..(7): X is F or P
  MISC_FEATURE (8)..(8): X is K, R or H for basic amino acids
  MISC_FEATURE (9)..(9): X is K, R or H for basic amino acids
  MISC_FEATURE (10)..(10): X is F or P
  MISC_FEATURE (11)..(11): X is I, L or V
  MISC_FEATURE (12)..(12): X is K, R or H for basic amino acids
  MISC_FEATURE (13)..(13): X is A and G
  MISC_FEATURE (14)..(14): X is I, L or V
  MISC_FEATURE (15)..(15): X is I, L or V
  MISC_FEATURE (16)..(16): X is A and G
  MISC_FEATURE (17)..(17): X is D and E for acidic amino acids
  MISC_FEATURE (18)..(18): X is D and E for acidic amino acids
  MISC_FEATURE (19)..(19): X is I, L or V
XXXXXXXXXXXXXXXXXXX

SEQ ID NO: 573 - protein, 19 aa, Artificial
  Completely synthesized peptide construct
  MISC_FEATURE (1)..(1): X is A and G
  MISC_FEATURE (2)..(2): X is N or Q for amidated amino acids
  MISC_FEATURE (3)..(3): X is F, W or Y for aromatic amino acids
  MISC_FEATURE (4)..(4): X is K, R or H for basic amino acids
  MISC_FEATURE (5)..(5): X is I, L or V
  MISC_FEATURE (6)..(6): X is I, L or V
  MISC_FEATURE (7)..(7): X is A and G
  MISC_FEATURE (8)..(8): X is F or P
  MISC_FEATURE (9)..(9): X is K, R or H for basic amino acids
  MISC_FEATURE (10)..(10): X is K, R or H for basic amino acids
  MISC_FEATURE (11)..(11): X is F or P
  MISC_FEATURE (12)..(12): X is I, L or V
  MISC_FEATURE (13)..(13): X is K, R or H for basic amino acids
  MISC_FEATURE (14)..(14): X is A and G
  MISC_FEATURE (15)..(15): X is GabaX for X2X3 or X3X2 or X2X3 or X3X2 or X3X3 or X2X2
  MISC_FEATURE (16)..(16): X is A and G
  MISC_FEATURE (17)..(17): X is D and E for acidic amino acids
  MISC_FEATURE (18)..(18): X is D and E for acidic amino acids
  MISC_FEATURE (19)..(19): X is I, L or V
XXXXXXXXXXXXXXXXXXX

SEQ ID NO: 574 - protein, 18 aa, Artificial
  Completely synthesized peptide construct
  MISC_FEATURE (1)..(1): X is A and G
  MISC_FEATURE (2)..(2): X is N or Q for amidated amino acids
  MISC_FEATURE (3)..(3): X is F, W or Y for aromatic amino acids
  MISC_FEATURE (4)..(4): X is K, R or H for basic amino acids
  MISC_FEATURE (5)..(5): X is I, L or V
  MISC_FEATURE (6)..(6): X is I, L or V
  MISC_FEATURE (7)..(7): X is A and G
  MISC_FEATURE (8)..(8): X is F or P
  MISC_FEATURE (9)..(9): X is K, R or H for basic amino acids
  MISC_FEATURE (10)..(10): X is K, R or H for basic amino acids
  MISC_FEATURE (11)..(11): X is F or P
  MISC_FEATURE (12)..(12): X is I, L or V
  MISC_FEATURE (13)..(13): X is K, R or H for basic amino acids
  MISC_FEATURE (14)..(14): X is A and G
  MISC_FEATURE (15)..(15): X is I, L or V
  MISC_FEATURE (16)..(16): X is I, L or V
  MISC_FEATURE (17)..(17): X is A and G
  MISC_FEATURE (18)..(18): X is GabaX for X2X3 or X3X2 or X2X3 or X3X2 or X3X3 or X2X2
XXXXXXXXXXXXXXXXXX

SEQ ID NO: 575 - protein, 18 aa, Artificial
  Completely synthesized peptide construct
  MISC_FEATURE (1)..(1): X is A and G
  MISC_FEATURE (2)..(2): X is N or Q for amidated amino acids
  MISC_FEATURE (3)..(3): X is F, W or Y for aromatic amino acids
  MISC_FEATURE (4)..(4): X is K, R or H for basic amino acids
  MISC_FEATURE (5)..(5): X is GabaX for X2X3 or X3X2 or X2X3 or X3X2 or X3X3 or X2X2
  MISC_FEATURE (6)..(6): X is A and G
  MISC_FEATURE (7)..(7): X is F or P
  MISC_FEATURE (8)..(8): X is K, R or H for basic amino acids
  MISC_FEATURE (9)..(9): X is K, R or H for basic amino acids
  MISC_FEATURE (10)..(10): X is F or P
  MISC_FEATURE (11)..(11): X is I, L or V
  MISC_FEATURE (12)..(12): X is K, R or H for basic amino acids
  MISC_FEATURE (13)..(13): X is A and G
  MISC_FEATURE (14)..(14): X is GabaX for X2X3 or X3X2 or X2X3 or X3X2 or X3X3 or X2X2
  MISC_FEATURE (15)..(15): X is A and G
  MISC_FEATURE (16)..(16): X is D and E for acidic amino acids
  MISC_FEATURE (17)..(17): X is D and E for acidic amino acids
  MISC_FEATURE (18)..(18): X is I, L or V
XXXXXXXXXXXXXXXXXX

SEQ ID NO: 576 - protein, 16 aa, Artificial
  Completely synthesized peptide construct
  MISC_FEATURE (1)..(1): X is A and G
  MISC_FEATURE (2)..(2): X is N or Q for amidated amino acids
  MISC_FEATURE (3)..(3): X is F, W or Y for aromatic amino acids
  MISC_FEATURE (4)..(4): X is K, R or H for basic amino acids
  MISC_FEATURE (5)..(5): X is GabaX for X2X3 or X3X2 or X2X3 or X3X2 or X3X3 or X2X2
  MISC_FEATURE (6)..(6): X is A and G
  MISC_FEATURE (7)..(7): X is F or P
  MISC_FEATURE (8)..(8): X is K, R or H for basic amino acids
  MISC_FEATURE (9)..(9): X is K, R or H for basic amino acids
  MISC_FEATURE (10)..(10): X is F or P
  MISC_FEATURE (11)..(11): X is I, L or V
  MISC_FEATURE (12)..(12): X is K, R or H for basic amino acids
  MISC_FEATURE (13)..(13): X is A and G
  MISC_FEATURE (14)..(14): X is GabaX for X2X3 or X3X2 or X2X3 or X3X2 or X3X3 or X2X2
  MISC_FEATURE (15)..(15): X is A and G
  MISC_FEATURE (16)..(16): X is GabaX for X2X3 or X3X2 or X2X3 or X3X2 or X3X3 or X2X2
XXXXXXXXXXXXXXXX

SEQ ID NO: 577 - protein, 17 aa, Artificial
  Completely synthesized peptide construct
  MISC_FEATURE (1)..(1): X is acetyl or propionyl group, D glycine or D alanine, cyclohexylalanine at amino terminus
  MISC_FEATURE (2)..(2): X is A and G
  MISC_FEATURE (3)..(3): X is N or Q for amidated amino acids
  MISC_FEATURE (4)..(4): X is F, W or Y for aromatic amino acids
  MISC_FEATURE (5)..(5): X is K, R or H for basic amino acids
  MISC_FEATURE (6)..(6): X is GabaX for X2X3 or X3X2 or X2X3 or X3X2 or X3X3 or X2X2
  MISC_FEATURE (7)..(7): X is A and G
  MISC_FEATURE (8)..(8): X is F or P
  MISC_FEATURE (9)..(9): X is K, R or H for basic amino acids
  MISC_FEATURE (10)..(10): X is K, R or H for basic amino acids
  MISC_FEATURE (11)..(11): X is F or P
  MISC_FEATURE (12)..(12): X is I, L or V
  MISC_FEATURE (13)..(13): X is K, R or H for basic amino acids
  MISC_FEATURE (14)..(14): X is A and G
  MISC_FEATURE (15)..(15): X is GabaX for X2X3 or X3X2 or X2X3 or X3X2 or X3X3 or X2X2
  MISC_FEATURE (16)..(16): X is A and G
  MISC_FEATURE (17)..(17): X is GabaX for X2X3 or X3X2 or X2X3 or X3X2 or X3X3 or X2X2
XXXXXXXXXXXXXXXXX

SEQ ID NO: 578 - protein, 21 aa, Artificial
  Completely synthesized peptide construct
  MISC_FEATURE (1)..(1): X is acetyl or propionyl group, D glycine or D alanine, cyclodexylalanine at amino terminus
  MISC_FEATURE (2)..(2): X is A and G
  MISC_FEATURE (3)..(3): X is N or Q for amidated amino acids
  MISC_FEATURE (4)..(4): X is F, W or Y for aromatic amino acids
  MISC_FEATURE (5)..(5): X is K, R or H for basic amino acids
  MISC_FEATURE (6)..(6): X is I, L or V
  MISC_FEATURE (7)..(7): X is I, L or V
  MISC_FEATURE (8)..(8): X is A and G
  MISC_FEATURE (9)..(9): X is F or P
  MISC_FEATURE (10)..(10): X is K, R or H for basic amino acids
  MISC_FEATURE (11)..(11): X is K, R or H for basic amino acids
  MISC_FEATURE (12)..(12): X is F or P
  MISC_FEATURE (13)..(13): X is I, L or V
  MISC_FEATURE (14)..(14): X is K, R or H for basic amino acids
  MISC_FEATURE (15)..(15): X is A and G
  MISC_FEATURE (16)..(16): X is I, L or V
  MISC_FEATURE (17)..(17): X is I, L or V
  MISC_FEATURE (18)..(18): X is A and G
  MISC_FEATURE (19)..(19): X is D and E for acidic amino acids
  MISC_FEATURE (20)..(20): X is D and E for acidic amino acids
  MISC_FEATURE (21)..(21): X is I, L or V
XXXXXXXXXXXXXXXXXXXXX

SEQ ID NO: 579 - protein, 21 aa, Artificial
  Completely synthesized peptide construct
  MISC_FEATURE (1)..(1): X is acetyl or propionyl group, D glycine or D alanine, cyclohexylalanine at amino terminus
  MISC_FEATURE (2)..(2): X is A and G
  MISC_FEATURE (3)..(3): X is N or Q for amidated amino acids
  MISC_FEATURE (4)..(4): X is F, W or Y for aromatic amino acids
  MISC_FEATURE (5)..(5): X is K, R or H for basic amino acids
  MISC_FEATURE (6)..(6): X is I, L or V
  MISC_FEATURE (7)..(7): X is I, L or V
  MISC_FEATURE (8)..(8): X is A and G
  MISC_FEATURE (9)..(9): X is F or P
  MISC_FEATURE (10)..(10): X is K, R or H for basic amino acids
  MISC_FEATURE (11)..(11): X is K, R or H for basic amino acids
  MISC_FEATURE (12)..(12): X is F or P
  MISC_FEATURE (13)..(13): X is I, L or V
  MISC_FEATURE (14)..(14): X is K, R or H for basic amino acids
  MISC_FEATURE (15)..(15): X is A and G
  MISC_FEATURE (16)..(16): X is I, L or V
  MISC_FEATURE (17)..(17): X is I, L or V
  MISC_FEATURE (18)..(18): X is A and G
  MISC_FEATURE (19)..(19): X is D and E for acidic amino acids
  MISC_FEATURE (20)..(20): X is D and E for acidic amino acids
  MISC_FEATURE (21)..(21): X is I, L or V
XXXXXXXXXXXXXXXXXXXXX

SEQ ID NO: 580 - protein, 20 aa, Artificial
  Completely synthesized peptide construct
  MISC_FEATURE (1)..(1): X is acetyl or propionyl group, D glycine or D alanine, cyclodexylalanine at amino terminus
  MISC_FEATURE (2)..(2): X is A and G
  MISC_FEATURE (3)..(3): X is N or Q for amidated amino terminus
  MISC_FEATURE (4)..(4): X is F, W or Y for aromatic amino acids
  MISC_FEATURE (5)..(5): X is K, R or H for basic amino acids
  MISC_FEATURE (6)..(6): X is GabaX for X2X3 or X3X2 or X2X3 or X3X2 or X3X3 or X2X2
  MISC_FEATURE (7)..(7): X is A and G
  MISC_FEATURE (8)..(8): X is F or P
  MISC_FEATURE (9)..(9): X is K, R or H for basic amino acids
  MISC_FEATURE (10)..(10): X is K, R or H for basic amino acids
  MISC_FEATURE (11)..(11): X is F or P
  MISC_FEATURE (12)..(12): X is I, L or V
  MISC_FEATURE (13)..(13): X is K, R or H for basic amino acids
  MISC_FEATURE (14)..(14): X is A and G
  MISC_FEATURE (15)..(15): X is I, L or V
  MISC_FEATURE (16)..(16): X is I, L or V
  MISC_FEATURE (17)..(17): X is A and G
  MISC_FEATURE (18)..(18): X is D and E for acidic amino acids
  MISC_FEATURE (19)..(19): X is D and E for acidic amino acids
  MISC_FEATURE (20)..(20): X is I, L or V
XXXXXXXXXXXXXXXXXXXX

SEQ ID NO: 581 - protein, 20 aa, Artificial
  Completely synthesized peptide construct
  MISC_FEATURE (1)..(1): X is acetyl or propionyl group, D glycine or D alanine, cyclohexylalanine at amino terminus
  MISC_FEATURE (2)..(2): X is A and G
  MISC_FEATURE (3)..(3): X is N or Q for amidated amino acids
  MISC_FEATURE (4)..(4): X is F, W or Y for aromatic amino acids
  MISC_FEATURE (5)..(5): X is K, R or H for basic amino acids
  MISC_FEATURE (6)..(6): X is I, L or V
  MISC_FEATURE (7)..(7): X is I, L or V
  MISC_FEATURE (8)..(8): X is A and G
  MISC_FEATURE (9)..(9): X is F or P
  MISC_FEATURE (10)..(10): X is K, R or H for basic amino acids
  MISC_FEATURE (11)..(11): X is K, R or H for basic amino acids
  MISC_FEATURE (12)..(12): X is F or P
  MISC_FEATURE (13)..(13): X is I, L or V
  MISC_FEATURE (14)..(14): X is K, R or H for basic amino acids
  MISC_FEATURE (15)..(15): X is A and G
  MISC_FEATURE (16)..(16): X is GabaX for X2X3 or X3X2 or X2X3 or X3X2 or X3X3 or X2X2
  MISC_FEATURE (17)..(17): X is A and G
  MISC_FEATURE (18)..(18): X is D and E for acidic amino acids
  MISC_FEATURE (19)..(19): X is D and E for acidic amino acids
  MISC_FEATURE (20)..(20): X is I, L or V
XXXXXXXXXXXXXXXXXXXX

SEQ ID NO: 582 - protein, 19 aa, Artificial
  Completely synthesized peptide construct
  MISC_FEATURE (1)..(1): X is acetyl or propionyl group, D glycine or D alanine, cyclohexylalanine at amino terminus
  MISC_FEATURE (2)..(2): X is A and G
  MISC_FEATURE (3)..(3): X is N or Q for amidated amino acids
  MISC_FEATURE (4)..(4): X is F, W or Y for aromatic amino acids
  MISC_FEATURE (5)..(5): X is K, R or H for basic amino acids
  MISC_FEATURE (6)..(6): X is I, L or V
  MISC_FEATURE (7)..(7): X is I, L or V
  MISC_FEATURE (8)..(8): X is A and G
  MISC_FEATURE (9)..(9): X is F or P
  MISC_FEATURE (10)..(10): X is K, R or H for basic amino acids
  MISC_FEATURE (11)..(11): X is K, R or H for basic amino acids
  MISC_FEATURE (12)..(12): X is F or P
  MISC_FEATURE (13)..(13): X is I, L or V
  MISC_FEATURE (14)..(14): X is K, R or H for basic amino acids
  MISC_FEATURE (15)..(15): X is A and G
  MISC_FEATURE (16)..(16): X is I, L or V
  MISC_FEATURE (17)..(17): X is I, L or V
  MISC_FEATURE (18)..(18): X is A and G
  MISC_FEATURE (19)..(19): X is GabaX for X2X3 or X3X2 or X2X3 or X3X2 or X3X3 or X2X2
XXXXXXXXXXXXXXXXXXX

SEQ ID NO: 583 - protein, 19 aa, Artificial
  Completely synthesized peptide construct
  MISC_FEATURE (1)..(1): X is acetyl or propionyl group, D glycine or D alanine, cyclodexylalanine at amino terminus
  MISC_FEATURE (2)..(2): X is A and G
  MISC_FEATURE (3)..(3): X is N or Q for amidated amino terminus
  MISC_FEATURE (4)..(4): X is F, W or Y for aromatic amino acids
  MISC_FEATURE (5)..(5): X is K, R or H for basic amino acids
  MISC_FEATURE (6)..(6): X is F, W or Y for aromatic amino acids
  MISC_FEATURE (7)..(7): X is A and G
  MISC_FEATURE (8)..(8): X is F or P
  MISC_FEATURE (9)..(9): X is K, R or H for basic amino acids
  MISC_FEATURE (10)..(10): X is K, R or H for basic amino acids
  MISC_FEATURE (11)..(11): X is F or P
  MISC_FEATURE (12)..(12): X is I, L or V
  MISC_FEATURE (13)..(13): X is K, R or H for basic amino acids
  MISC_FEATURE (14)..(14): X is A and G
  MISC_FEATURE (15)..(15): X is GabaX for X2X3 or X3X2 or X2X3 or X3X2 or X3X3 or X2X2
  MISC_FEATURE (16)..(16): X is A and G
  MISC_FEATURE (17)..(17): X is D and E for acidic amino acids
  MISC_FEATURE (18)..(18): X is D and E for acidic amino acids
  MISC_FEATURE (19)..(19): X is I, L or V
XXXXXXXXXXXXXXXXXXX

SEQ ID NO: 584 - protein, 17 aa, Artificial
  Completely synthesized peptide construct
  MISC_FEATURE (1)..(1): X is acetyl or propionyl group, D glycine or Dalanine, cyclohexylalanine at amino terminus
  MISC_FEATURE (2)..(2): X is A and G
  MISC_FEATURE (3)..(3): X is N or Q for amidated amino acids
  MISC_FEATURE (4)..(4): X is F, W or Y for aromatic amino acids
  MISC_FEATURE (5)..(5): X is K, R or H for basic amino acids
  MISC_FEATURE (6)..(6): X is GabaX for X2X3 or X3X2 or X2X3 or X3X2 or X3X3 or X2X2
  MISC_FEATURE (7)..(7): X is A and G
  MISC_FEATURE (8)..(8): X is F or P
  MISC_FEATURE (9)..(9): X is K, R or H for basic amino acids
  MISC_FEATURE (10)..(10): X is F or P
  MISC_FEATURE (11)..(11): X is I, L or V
  MISC_FEATURE (12)..(12): X is K, R or H for basic amino acids
  MISC_FEATURE (13)..(13): X is K, R or H for basic amino acids
  MISC_FEATURE (14)..(14): X is A and G
  MISC_FEATURE (15)..(15): X is GabaX for X2X3 or X3X2 or X2X3 or X3X2 or X3X3 or X2X2
  MISC_FEATURE (16)..(16): X is A and G
  MISC_FEATURE (17)..(17): X is GabaX for X2X3 or X3X2 or X2X3 or X3X2 or X3X3 or X2X2
XXXXXXXXXXXXXXXXX

SEQ ID NO: 585 - protein, 18 aa, Artificial
  Completely synthesized peptide construct
  MISC_FEATURE (1)..(1): X is acetyl or propionyl group, D glycine or D alanine, cyclodexylalanine at amino terminus
  MISC_FEATURE (2)..(2): X is A and G
  MISC_FEATURE (3)..(3): X is N or Q for amidated amino acids
  MISC_FEATURE (4)..(4): X is F, W or Y for aromatic amino acids
  MISC_FEATURE (5)..(5): X is K, R or H for basic amino acids
  MISC_FEATURE (6)..(6): X is GabaX for X2X3 or X3X2 or X2X3 or X3X2 or X3X3 or X2X2
  MISC_FEATURE (7)..(7): X is A and G
  MISC_FEATURE (8)..(8): X is F or P
  MISC_FEATURE (9)..(9): X is K, R or H for basic amino acids
  MISC_FEATURE (10)..(10): X is K, R or H for basic amino acids
  MISC_FEATURE (11)..(11): X is F or P
  MISC_FEATURE (12)..(12): X is I, L or V
  MISC_FEATURE (13)..(13): X is K, R or H for basic amino acids
  MISC_FEATURE (14)..(14): X is A and G
  MISC_FEATURE (15)..(15): X is I, L or V
  MISC_FEATURE (16)..(16): X is I, L or V
  MISC_FEATURE (17)..(17): X is A and G
  MISC_FEATURE (18)..(18): X is GabaX for X2X3 or X3X2 or X2X3 or X3X2 or X3X3 or X2X2
XXXXXXXXXXXXXXXXXX

SEQ ID NO: 586 - protein, 20 aa, Artificial
  Completely synthesized peptide construct
NATGMEVGWYRPPFSRVVHL

SEQ ID NO: 587 - protein, 20 aa, Artificial
  Completely synthesized peptide construct
  MISC_FEATURE (1)..(1): X is N or Q for amidated amino acids
  MISC_FEATURE (2)..(2): X is A and G
  MISC_FEATURE (3)..(3): X is T or S
  MISC_FEATURE (4)..(4): X is A and G
  MISC_FEATURE (5)..(5): X is M or Nle (Norleucine)
  MISC_FEATURE (6)..(6): X is D and E for acidic amino acids
  MISC_FEATURE (7)..(7): X is I, L or V
  MISC_FEATURE (8)..(8): X is A and G
  MISC_FEATURE (9)..(9): X is F, W or Y for aromatic amino acids
  MISC_FEATURE (10)..(10): X is F, W or Y for aromatic amino acids
  MISC_FEATURE (11)..(11): X is K, R or H for basic amino acids
  MISC_FEATURE (12)..(12): X is F or P
  MISC_FEATURE (13)..(13): X is F or P
  MISC_FEATURE (14)..(14): X is F or P
  MISC_FEATURE (15)..(15): X is T or S
  MISC_FEATURE (16)..(16): X is K, R or H for basic amino acids
  MISC_FEATURE (17)..(17): X is I, L or V
  MISC_FEATURE (18)..(18): X is I, L or V
  MISC_FEATURE (19)..(19): X is K, R or H for basic amino acids
  MISC_FEATURE (20)..(20): X is I, L or V
XXXXXXXXXXXXXXXXXXXX

SEQ ID NO: 588 - protein, 19 aa, Artificial
  Completely synthesized peptide construct
  MISC_FEATURE (1)..(1): X is N or Q for amidated amino acids
  MISC_FEATURE (2)..(2): X is A and G
  MISC_FEATURE (3)..(3): X is T or S
  MISC_FEATURE (4)..(4): X is A and G
  MISC_FEATURE (5)..(5): X is M or Nle (Norleucine)
  MISC_FEATURE (6)..(6): X is GabaX for X2X3 or X3X2 or X2X3 or X3X2 or X3X3 or X2X2
  MISC_FEATURE (7)..(7): X is A and G
  MISC_FEATURE (8)..(8): X is F, W or Y for aromatic amino acids
  MISC_FEATURE (9)..(9): X is F, W or Y for aromatic amino acids
  MISC_FEATURE (10)..(10): X is K, R or H for basic amino acids
  MISC_FEATURE (11)..(11): X is F or P
  MISC_FEATURE (12)..(12): X is F or P
  MISC_FEATURE (13)..(13): X is F or P
  MISC_FEATURE (14)..(14): X is T or S
  MISC_FEATURE (15)..(15): X is K, R or H for basic amino acids
  MISC_FEATURE (16)..(16): X is I, L or V
  MISC_FEATURE (17)..(17): X is I, L or V
  MISC_FEATURE (18)..(18): X is K, R or H for basic amino acids
  MISC_FEATURE (19)..(19): X is I, L or V
XXXXXXXXXXXXXXXXXXX

SEQ ID NO: 589 - protein, 19 aa, Artificial
  Completely synthesized peptide construct
  MISC_FEATURE (1)..(1): X is N or Q for amidated amino acids
  MISC_FEATURE (2)..(2): X is A and G
  MISC_FEATURE (3)..(3): X is T or S
  MISC_FEATURE (4)..(4): X is A and G
  MISC_FEATURE (5)..(5): X is M or Nle (Norleucine)
  MISC_FEATURE (6)..(6): X is D and E for acidic amino acids
  MISC_FEATURE (7)..(7): X is I, L or V
  MISC_FEATURE (8)..(8): X is A and G
  MISC_FEATURE (9)..(9): X is F, W or Y for aromatic amino acids
  MISC_FEATURE (10)..(10): X is F, W or Y for aromatic amino acids
  MISC_FEATURE (11)..(11): X is K, R or H for basic amino acids
  MISC_FEATURE (12)..(12): X is F or P
  MISC_FEATURE (13)..(13): X is F or P
  MISC_FEATURE (14)..(14): X is F or P
  MISC_FEATURE (15)..(15): X is T or S
  MISC_FEATURE (16)..(16): X is K, R or H for basic amino acids
  MISC_FEATURE (17)..(17): X is GabaX for X2X3 or X3X2 or X2X3 or X3X2 or X3X3 or X2X2
  MISC_FEATURE (18)..(18): X is K, R or H for basic amino acids
  MISC_FEATURE (19)..(19): X is I, L or V
XXXXXXXXXXXXXXXXXXX

SEQ ID NO: 590 - protein, 18 aa, Artificial
  Completely synthesized peptide construct
  MISC_FEATURE (1)..(1): X is N or Q for amidated amino acids
  MISC_FEATURE (2)..(2): X is A and G
  MISC_FEATURE (3)..(3): X is T or S
  MISC_FEATURE (4)..(4): X is A and G
  MISC_FEATURE (5)..(5): X is M or Nle (Norleucine)
  MISC_FEATURE (6)..(6): X is GabaX for X2X3 or X3X2 or X2X3 or X3X2 or X3X3 or X2X2
  MISC_FEATURE (7)..(7): X is A and G
  MISC_FEATURE (8)..(8): X is F, W or Y for aromatic amino acids
  MISC_FEATURE (9)..(9): X is F, W or Y for aromatic amino acids
  MISC_FEATURE (10)..(10): X is K, R or H for basic amino acids
  MISC_FEATURE (11)..(11): X is F or P
  MISC_FEATURE (12)..(12): X is F or P
  MISC_FEATURE (13)..(13): X is F or P
  MISC_FEATURE (14)..(14): X is T or S
  MISC_FEATURE (15)..(15): X is K, R or H for basic amino acids
  MISC_FEATURE (16)..(16): X is GabaX for X2X3 or X3X2 or X2X3 or X3X2 or X3X3 or X2X2
  MISC_FEATURE (17)..(17): X is K, R or H for basic amino acids
  MISC_FEATURE (18)..(18): X is D and E for acidic amino acids
XXXXXXXXXXXXXXXXXX

SEQ ID NO: 591 - protein, 21 aa, Artificial
  Completely synthesized peptide construct
  MISC_FEATURE (1)..(1): X is acetyl or propionyl group, D glycine or D alanine, cyclohexylalanine at amino terminus
  MISC_FEATURE (2)..(2): X is N or Q for amidated amino acids
  MISC_FEATURE (3)..(3): X is A and G
  MISC_FEATURE (4)..(4): X is T or S
  MISC_FEATURE (5)..(5): X is A and G
  MISC_FEATURE (6)..(6): X is M or Nle (Norleucine)
  MISC_FEATURE (7)..(7): X is D and E for acidic amino acids
  MISC_FEATURE (8)..(8): X is I, L or V
  MISC_FEATURE (9)..(9): X is A and G
  MISC_FEATURE (10)..(10): X is F, W or Y for aromatic amino acids
  MISC_FEATURE (11)..(11): X is F, W or Y for aromatic amino acids
  MISC_FEATURE (12)..(12): X is K, R or H for basic amino acids
  MISC_FEATURE (13)..(13): X is F or P
  MISC_FEATURE (14)..(14): X is F or P
  MISC_FEATURE (15)..(15): X is F or P
  MISC_FEATURE (16)..(16): X is T or S
  MISC_FEATURE (17)..(17): X is K, R or H for basic amino acids
  MISC_FEATURE (18)..(18): X is I, L or V
  MISC_FEATURE (19)..(19): X is I, L or V
  MISC_FEATURE (20)..(20): X is K, R or H for basic amino acids
  MISC_FEATURE (21)..(21): X is I, L or V
XXXXXXXXXXXXXXXXXXXXX

SEQ ID NO: 592 - protein, 20 aa, Artificial
  Completely synthesized peptide construct
  MISC_FEATURE (1)..(1): X is acetyl or propionyl group, D glycine or D alanine, cyclohexylalanine at amino terminus
  MISC_FEATURE (2)..(2): X is N or Q for amidated amino acids
  MISC_FEATURE (3)..(3): X is A and G
  MISC_FEATURE (4)..(4): X is T or S
  MISC_FEATURE (5)..(5): X is A and G
  MISC_FEATURE (6)..(6): X is M or Nle (Norleucine)
  MISC_FEATURE (7)..(7): X is GabaX for X2X3 or X3X2 or X2X3 or X3X2 or X3X3 or X2X2
  MISC_FEATURE (8)..(8): X is A and G
  MISC_FEATURE (9)..(9): X is F, W or Y for aromatic amino acids
  MISC_FEATURE (10)..(10): X is F, W or Y for aromatic amino acids
  MISC_FEATURE (11)..(11): X is K, R or H for basic amino acids
  MISC_FEATURE (12)..(12): X is F or P
  MISC_FEATURE (13)..(13): X is F or P
  MISC_FEATURE (14)..(14): X is F or P
  MISC_FEATURE (15)..(15): X is T or S
  MISC_FEATURE (16)..(16): X is K, R or H for basic amino acids
  MISC_FEATURE (17)..(17): X is I, L or V
  MISC_FEATURE (18)..(18): X is I, L or V
  MISC_FEATURE (19)..(19): X is K, R or H for basic amino acids
  MISC_FEATURE (20)..(20): X is I, L or V
XXXXXXXXXXXXXXXXXXXX

SEQ ID NO: 593 - protein, 20 aa, Artificial
  Completely synthesized peptide construct
  MISC_FEATURE (1)..(1): X is acetyl or propionyl group, D glycine or D alanine, cyclohexylalanine at amino terminus
  MISC_FEATURE (2)..(2): X is N or Q for amidated amino acids
  MISC_FEATURE (3)..(3): X is A and G
  MISC_FEATURE (4)..(4): X is T or S
  MISC_FEATURE (5)..(5): X is A and G
  MISC_FEATURE (6)..(6): X is M or Nle (Norleucine)
  MISC_FEATURE (7)..(7): X is D and E for acidic amino acids
  MISC_FEATURE (8)..(8): X is I, L or V
  MISC_FEATURE (9)..(9): X is A and G
  MISC_FEATURE (10)..(10): X is F, W or Y for aromatic amino acids
  MISC_FEATURE (11)..(11): X is F, W or Y for aromatic amino acids
  MISC_FEATURE (12)..(12): X is K, R or H for basic amino acids
  MISC_FEATURE (13)..(13): X is F or P
  MISC_FEATURE (14)..(14): X is F or P
  MISC_FEATURE (15)..(15): X is F or P
  misc_feature (16)..(16): Xaa can be any naturally occurring amino acid
  MISC_FEATURE (17)..(17): X is K, R or H for basic amino acids
  MISC_FEATURE (18)..(18): X is GabaX for X2X3 or X3X2 or X2X3 or X3X2 or X3X3 or X2X2
  MISC_FEATURE (19)..(19): X is K, R or H for basic amino acids
  MISC_FEATURE (20)..(20): X is I, l or V
XXXXXXXXXXXXXXXXXXXX

SEQ ID NO: 594 - protein, 19 aa, Artificial
  Completely synthesized peptide construct
  MISC_FEATURE (1)..(1): X is acetyl or propionyl group, D glycine or D alanine, cyclohexylalanine at amino terminus
  MISC_FEATURE (2)..(2): X is N or Q for amidated amino acids
  MISC_FEATURE (3)..(3): X is A and G
  MISC_FEATURE (4)..(4): X is T or S
  MISC_FEATURE (5)..(5): X is A and G
  MISC_FEATURE (6)..(6): X is M or Nle (Norleucine)
  MISC_FEATURE (7)..(7): X is GabaX for X2X3 or X3X3 or X2X3 or X3X2 or X3X3 or X2X2
  MISC_FEATURE (8)..(8): X is A and G
  MISC_FEATURE (9)..(9): X is F, W or Y for aromatic amino acids
  MISC_FEATURE (10)..(10): X is F, W or Y for aromatic amino acids
  MISC_FEATURE (11)..(11): X is F, W or Y for aromatic amino acids
  MISC_FEATURE (11)..(11): X is K, R or H for basic amino acids
  MISC_FEATURE (12)..(12): X is F or P
  MISC_FEATURE (13)..(13): X is F or P
  MISC_FEATURE (14)..(14): X is F or P
  MISC_FEATURE (15)..(15): X is T or S
  MISC_FEATURE (16)..(16): X is K, R or H for basic amino acids
  MISC_FEATURE (17)..(17): X is GabaX for X2X3 or X3X2 or X2X3 or X3X2 or X3X3 or X2X2
  MISC_FEATURE (18)..(18): X is K, R or H for basic amino acids
  MISC_FEATURE (19)..(19): X is I, L or V
XXXXXXXXXXXXXXXXXXX

SEQ ID NO: 595 - protein, 20 aa, Artificial
  Completely synthesized peptide construct
QAPEYRGRTELLKDAIGEGK

SEQ ID NO: 596 - protein, 20 aa, Artificial
  Completely synthesized peptide construct
  MISC_FEATURE (1)..(1): X is N or Q for amidated amino acids
  MISC_FEATURE (2)..(2): X is A and G
  MISC_FEATURE (3)..(3): X is F or P
  MISC_FEATURE (4)..(4): X is D and E for acidic amino acids
  MISC_FEATURE (5)..(5): X is F, W or Y for aromatic amino acids
  MISC_FEATURE (6)..(6): X is K, R or H for basic amino acids
  MISC_FEATURE (7)..(7): X is A and G
  MISC_FEATURE (8)..(8): X is K, R or H for basic amino acids
  MISC_FEATURE (9)..(9): X is T or S
  MISC_FEATURE (10)..(10): X is D and E for acidic amino acids
  MISC_FEATURE (11)..(11): X is I, L or V
  MISC_FEATURE (12)..(12): X is I, L or V
  MISC_FEATURE (13)..(13): X is K, R or H for basic amino acids
  MISC_FEATURE (14)..(14): X is D and E for acidic amino acids
  MISC_FEATURE (15)..(15): X is A and G
  MISC_FEATURE (16)..(16): X is I, L or V
  MISC_FEATURE (17)..(17): X is A and G
  MISC_FEATURE (18)..(18): X is D and E for acidic amino acids
  MISC_FEATURE (19)..(19): X is A and G
  MISC_FEATURE (20)..(20): X is K, R or H for basic amino acids
XXXXXXXXXXXXXXXXXXXX

SEQ ID NO: 597 - protein, 19 aa, Artificial
  Completely synthesized peptide construct
  MISC_FEATURE (1)..(1): X is N or Q for amidated amino acids
  MISC_FEATURE (2)..(2): X is A and G
  MISC_FEATURE (3)..(3): X is F or P
  MISC_FEATURE (4)..(4): X is D and E for acidic amino acids
  MISC_FEATURE (5)..(5): X is F, W or Y for aromatic amino acids
  MISC_FEATURE (6)..(6): X is K, R or H for basic amino acids
  MISC_FEATURE (7)..(7): X is A and G
  MISC_FEATURE (8)..(8): X is K, R or H for basic amino acids
  MISC_FEATURE (9)..(9): X is T or S
  MISC_FEATURE (10)..(10): X is GabaX for X2X3 or X3X2 or X2X3 orX3X2 or X3X3 or X2X2
  MISC_FEATURE (11)..(11): X is I, L or V
  MISC_FEATURE (12)..(12): X is K, R or H for basic amino acids
  MISC_FEATURE (13)..(13): X is D and E for acidic amino acids
  MISC_FEATURE (14)..(14): X is A and G
  MISC_FEATURE (15)..(15): X is I, L or V
  MISC_FEATURE (16)..(16): X is A and G
  MISC_FEATURE (17)..(17): X is D and E for acidic amino acids
  MISC_FEATURE (18)..(18): X is A and G
  MISC_FEATURE (19)..(19): X is K, R or H for basic amino acids
XXXXXXXXXXXXXXXXXXX

SEQ ID NO: 598 - protein, 18 aa, Artificial
  Completely synthesized peptide construct
  MISC_FEATURE (1)..(1): X is N or Q for amidated amino acids
  MISC_FEATURE (2)..(2): X is A and G
  MISC_FEATURE (3)..(3): X is F or P
  MISC_FEATURE (4)..(4): X is D and E for acidic amino acids
  MISC_FEATURE (5)..(5): X is F, W or Y for aromatic amino acids
  MISC_FEATURE (6)..(6): X is K, R or H for basic amino acids
  MISC_FEATURE (7)..(7): X is A and G
  MISC_FEATURE (8)..(8): X is K, R or H for basic amino acids
  MISC_FEATURE (9)..(9): X is T or S
  MISC_FEATURE (10)..(10): X is 5-aminopentanoic acid for replacement of 3 or 4 amino acids of X2 and X3
  MISC_FEATURE (11)..(11): X is K, R or H for basic amino acids
  MISC_FEATURE (12)..(12): X is D and E for acidic amino acids
  MISC_FEATURE (13)..(13): X is A and G
  MISC_FEATURE (14)..(14): X is I, L or V
  MISC_FEATURE (15)..(15): X is A and G
  MISC_FEATURE (16)..(16): X is A and G
  MISC_FEATURE (16)..(16): X is D and E for acidic amino acids
  MISC_FEATURE (17)..(17): X is A and G
  MISC_FEATURE (18)..(18): X is K, R or H for basic amino acids
XXXXXXXXXXXXXXXXXX

SEQ ID NO: 599 - protein, 21 aa, Artificial
  Completely synthesized peptide construct
  MISC_FEATURE (1)..(1): X is acetyl or propionyl group, D glycine or D alanine, cyclohexylalanine at amino terminus
  MISC_FEATURE (2)..(2): X is N or Q for amidated amino acids
  MISC_FEATURE (3)..(3): X is A and G
  MISC_FEATURE (4)..(4): X is F or P
  MISC_FEATURE (5)..(5): X is D and E for acidic amino acids
  MISC_FEATURE (6)..(6): X is F, W or Y for aromatic amino acids
  MISC_FEATURE (7)..(7): X is K, R or H for basic amino acids
  MISC_FEATURE (8)..(8): X is A and G
  MISC_FEATURE (9)..(9): X is K, R or H for basic amino acids
  MISC_FEATURE (10)..(10): X is T or S
  MISC_FEATURE (11)..(11): X is D and E for acidic amino acids
  MISC_FEATURE (12)..(12): X is I, L or V
  MISC_FEATURE (13)..(13): X is I, L or V
  MISC_FEATURE (14)..(14): X is K, R or H for basic amino acids
  MISC_FEATURE (15)..(15): X is D and E for acidic amino acids
  MISC_FEATURE (16)..(16): X is A and G
  MISC_FEATURE (17)..(17): X is I, L or V
  MISC_FEATURE (18)..(18): X is A and G
  MISC_FEATURE (19)..(19): X is D and E for acidic amino acids
  MISC_FEATURE (20)..(20): X is A and G
  MISC_FEATURE (21)..(21): X is K, R or H for basic amino acids
XXXXXXXXXXXXXXXXXXXXX

SEQ ID NO: 600 - protein, 20 aa, Artificial
  Completely synthesized peptide construct
  MISC_FEATURE (1)..(1): X is acetyl or propionyl group, D glycine or D alanine, cyclohexylalanine at amino terminus
  MISC_FEATURE (2)..(2): X is N or Q for amidated amino acids
  MISC_FEATURE (3)..(3): X is A and G
  MISC_FEATURE (4)..(4): X is F or P
  MISC_FEATURE (5)..(5): X is D and E for acidic amino acids
  MISC_FEATURE (6)..(6): X is F, W or Y for aromatic amino acids
  MISC_FEATURE (7)..(7): X is K, R or H for basic amino acids
  MISC_FEATURE (8)..(8): X is A and G
  MISC_FEATURE (9)..(9): X is K, R or H for basic amino acids
  MISC_FEATURE (10)..(10): X is T or S
  MISC_FEATURE (11)..(11): X is GabaX for X2X3 or X3X2 or X2X3 or X3X2 or X3X3 or X2X2
  MISC_FEATURE (12)..(12): X is  I, L or V
  MISC_FEATURE (13)..(13): X is K, R or H for basic amino acids
  MISC_FEATURE (14)..(14): X is D and E for acidic amino acids
  MISC_FEATURE (15)..(15): X is A and G
  MISC_FEATURE (16)..(16): X is I, L or V
  MISC_FEATURE (17)..(17): X is A and G
  MISC_FEATURE (18)..(18): X is D and E for acidic amino acids
  MISC_FEATURE (19)..(19): X is A and G
  MISC_FEATURE (20)..(20): X is K, R or H for basic amino acids
XXXXXXXXXXXXXXXXXXXX

SEQ ID NO: 601 - protein, 19 aa, Artificial
  Completely synthesized peptide construct
  MISC_FEATURE (1)..(1): X is acetyl or propionyl group, D glycine or D alanine, cyclohexylalanine at amino terminus
  MISC_FEATURE (2)..(2): X is N or Q for amidated amino acids
  MISC_FEATURE (3)..(3): X is A and G
  MISC_FEATURE (4)..(4): X is F or P
  MISC_FEATURE (5)..(5): X is D and E for acidic amino acids
  MISC_FEATURE (6)..(6): X is F, W or Y for aromatic amino acids
  MISC_FEATURE (7)..(7): X is K, R or H for basic amino acids
  MISC_FEATURE (8)..(8): X is A and G
  MISC_FEATURE (9)..(9): X is K, R or H for basic amino acids
  MISC_FEATURE (10)..(10): X is T or S
  MISC_FEATURE (11)..(11): X is 5-aminopentanoic acid for replacement of 3 or 4 amino acids of X2and X3
  MISC_FEATURE (12)..(12): X is K, R or H for basic amino acids
  MISC_FEATURE (13)..(13): X is D and E for acidic amino acids
  MISC_FEATURE (14)..(14): X is A and G
  MISC_FEATURE (15)..(15): X is I, L or V
  MISC_FEATURE (16)..(16): X is A and G
  MISC_FEATURE (17)..(17): X is D and E for acidic amino acids
  MISC_FEATURE (18)..(18): X is A and G
  MISC_FEATURE (19)..(19): X is K, R or H for basic amino acids
XXXXXXXXXXXXXXXXXXX

SEQ ID NO: 602 - protein, 20 aa, Artificial
  Completely synthesized peptide construct
SDEGGFTCFFRDHSYQEEAA

SEQ ID NO: 603 - protein, 20 aa, Artificial
  Completely synthesized peptide construct
  MISC_FEATURE (1)..(1): X is T or S
  MISC_FEATURE (2)..(2): X is D and E for acidic amino acids
  MISC_FEATURE (3)..(3): X is A and G
  MISC_FEATURE (4)..(4): X is A and G
  MISC_FEATURE (5)..(5): X is A and G
  MISC_FEATURE (6)..(6): X is T or S
  MISC_FEATURE (7)..(7): X is T or S
  MISC_FEATURE (8)..(8): X is C or S
  MISC_FEATURE (9)..(9): X is F or P
  MISC_FEATURE (10)..(10): X is F or P
  MISC_FEATURE (11)..(11): X is K, R or H for basic amino acids
  MISC_FEATURE (12)..(12): X is D and E for acidic amino acids
  MISC_FEATURE (13)..(13): X is K, R or H for basic amino acids
  MISC_FEATURE (14)..(14): X is T or S
  MISC_FEATURE (15)..(15): X is F, W or Y for aromatic amino acids
  MISC_FEATURE (16)..(16): X is N or Q for amidated amino acids
  MISC_FEATURE (17)..(17): X is D and E for acidic amino acids
  MISC_FEATURE (18)..(18): X is D and E for acidic amino acids
  MISC_FEATURE (19)..(19): X is A and G
  MISC_FEATURE (20)..(20): X is A and G
XXXXXXXXXXXXXXXXXXXX

SEQ ID NO: 604 - protein, 19 aa, Artificial
  Completely synthesized peptide construct
  MISC_FEATURE (1)..(1): X is T or S
  MISC_FEATURE (2)..(2): X is GabaX for X2X3 or X3X2 or X2X3 or X3X2 or X3X3 or X2X2
  MISC_FEATURE (3)..(3): X is A and G
  MISC_FEATURE (4)..(4): X is A and G
  MISC_FEATURE (5)..(5): X is F or P
  MISC_FEATURE (6)..(6): X is T or S
  MISC_FEATURE (7)..(6): X is C or S
  misc_feature (7)..(7): Xaa can be any naturally occurring amino acid
  MISC_FEATURE (8)..(8): X is F or P
  MISC_FEATURE (9)..(9): X is F or P
  MISC_FEATURE (10)..(10): X is K, R or H for basic amino acids
  MISC_FEATURE (11)..(11): X is D and E for acidic amino acids
  MISC_FEATURE (12)..(12): X is K, R or H for basic amino acids
  MISC_FEATURE (13)..(13): X is T or S
  MISC_FEATURE (14)..(14): X is F, W for Y for aromatic amino acids
  MISC_FEATURE (15)..(15): X is N or Q for amidated amino acids
  MISC_FEATURE (16)..(16): X is D and E for acidic amino acids
  MISC_FEATURE (17)..(17): X is D and E for acidic amino acids
  MISC_FEATURE (18)..(18): X is A and G
  MISC_FEATURE (19)..(19): X is A and G
XXXXXXXXXXXXXXXXXXX

SEQ ID NO: 605 - protein, 19 aa, Artificial
  Completely synthesized peptide construct
  MISC_FEATURE (1)..(1): X is T or S
  MISC_FEATURE (2)..(2): X is D and E for acidic amino acids
  MISC_FEATURE (3)..(3): X is D and E for acidic amino acids
  MISC_FEATURE (4)..(4): X is A and G
  MISC_FEATURE (5)..(5): X is A and G
  MISC_FEATURE (6)..(6): X is F or P
  MISC_FEATURE (7)..(7): X is T or S
  MISC_FEATURE (8)..(8): X is C or S
  MISC_FEATURE (9)..(9): X is F or P
  MISC_FEATURE (10)..(10): X is F or P
  MISC_FEATURE (11)..(11): X is K, R or H for basic amino acids
  MISC_FEATURE (12)..(12): X is D and E for acidic amino acids
  MISC_FEATURE (13)..(13): X is K, R or H for basic amino acids
  MISC_FEATURE (14)..(14): X is T or S
  MISC_FEATURE (15)..(15): X is F, W or Y for aromatic amino acids
  MISC_FEATURE (16)..(16): X is N or Q for amidated amino acids
  MISC_FEATURE (17)..(17): X is GabaX for X2X3 or X3X2 or X2X3 or X3X2 or X3X3 or X2X2
  MISC_FEATURE (18)..(18): X is A and G
  MISC_FEATURE (19)..(19): X is A and G
XXXXXXXXXXXXXXXXXXX

SEQ ID NO: 606 - protein, 18 aa, Artificial
  Completely synthesized peptide construct
  MISC_FEATURE (1)..(1): X is T or S
  MISC_FEATURE (2)..(2): X is GabaX for X2X3 or X3X2 or X2X3 or X3X2 or X3X3 or X2X2
  MISC_FEATURE (3)..(3): X is A and G
  MISC_FEATURE (4)..(4): X is A and G
  MISC_FEATURE (5)..(5): X is F or P
  MISC_FEATURE (6)..(6): X is T or S
  MISC_FEATURE (7)..(7): X is C or S
  MISC_FEATURE (8)..(8): X is F or P
  MISC_FEATURE (9)..(9): X is F or P
  MISC_FEATURE (10)..(10): X is K, R or H for basic amino acids
  MISC_FEATURE (11)..(11): X is D and E for acidic amino acids
  MISC_FEATURE (12)..(12): X is K, R or H for basic amino acids
  MISC_FEATURE (13)..(13): X is T or S
  MISC_FEATURE (14)..(14): X is F, W or Y for aromatic amino acids
  MISC_FEATURE (15)..(15): X is N or Q for amidated amino acids
  MISC_FEATURE (16)..(16): X is GabaX for X2X3 or X3X2 or X2X3 or X3X2 or X3X3 or X2X2
  MISC_FEATURE (17)..(17): X is A and G
  MISC_FEATURE (18)..(18): X is A and G
XXXXXXXXXXXXXXXXXX

SEQ ID NO: 607 - protein, 21 aa, Artificial
  Completely synthesized peptide construct
  MISC_FEATURE (1)..(1): X is acetyl or propionyl group, D glycine or D alanine, cyclohexylalanine at amino terminus
  MISC_FEATURE (2)..(2): X is T or S
  MISC_FEATURE (3)..(3): X is D and E for acidic amino acids
  MISC_FEATURE (4)..(4): X is D and E for acidic amino acids
  MISC_FEATURE (5)..(5): X is A and G
  MISC_FEATURE (6)..(6): X is A and G
  MISC_FEATURE (7)..(7): X is F or P
  MISC_FEATURE (8)..(8): X is T or S
  MISC_FEATURE (9)..(9): X is C or S
  MISC_FEATURE (10)..(10): X is F or P
  MISC_FEATURE (11)..(11): X is F or P
  MISC_FEATURE (12)..(12): X is K, R or H for basic amino acids
  MISC_FEATURE (13)..(13): X is D and E for acidic amino acids
  MISC_FEATURE (14)..(14): X is K, R or H for basic amino acids
  MISC_FEATURE (15)..(15): X is T or S
  MISC_FEATURE (16)..(16): X is F, W or Y for aromatic amino acids
  MISC_FEATURE (17)..(17): X is N or Q for amidated amino acids
  MISC_FEATURE (18)..(18): X is D and E for acidic amino acids
  MISC_FEATURE (19)..(19): X is D and E for acidic amino acids
  MISC_FEATURE (20)..(20): X is A and G
  MISC_FEATURE (21)..(21): X is A and G
XXXXXXXXXXXXXXXXXXXXX

SEQ ID NO: 608 - protein, 20 aa, Artificial
  Completely synthesized peptide construct
  MISC_FEATURE (1)..(1): X is acetyl or propionyl group, D glycine or D alanine, cyclohexylalanine at amino terminus
  MISC_FEATURE (2)..(2): X is T or S
  MISC_FEATURE (3)..(3): X is GabaX for X2X3 or X3X2 or X2X3 or X3X2 or X3X3 or X2X2
  MISC_FEATURE (4)..(4): X is A and G
  MISC_FEATURE (5)..(5): X is A and G
  MISC_FEATURE (6)..(6): X is F or P
  MISC_FEATURE (7)..(7): X is T or S
  MISC_FEATURE (8)..(8): X is C or S
  MISC_FEATURE (9)..(9): X is F or P
  MISC_FEATURE (10)..(10): X is F or P
  MISC_FEATURE (11)..(11): X is K, R or H for basic amino acids
  MISC_FEATURE (12)..(12): X is D and E for acidic amino acids
  MISC_FEATURE (13)..(13): X is K, R or H for basic amino acids
  MISC_FEATURE (14)..(14): X is T or S
  MISC_FEATURE (15)..(15): X is F, W or Y for aromatic amino acids
  MISC_FEATURE (16)..(16): X is N or Q for amidated amino acids
  MISC_FEATURE (17)..(17): X is D and E for acidic amino acids
  MISC_FEATURE (18)..(18): X is D and E for acidic amino acids
  MISC_FEATURE (19)..(19): X is A and G
  MISC_FEATURE (20)..(20): X is A and G
XXXXXXXXXXXXXXXXXXXX

SEQ ID NO: 609 - protein, 20 aa, Artificial
  Completely synthesized peptide construct
  MISC_FEATURE (1)..(1): X is acetyl or propionyl group, D glycine or D alanine, cyclohexylalanine at amino terminus
  MISC_FEATURE (2)..(2): X is T or S
  MISC_FEATURE (3)..(3): X is D and E for acidic amino acids
  MISC_FEATURE (4)..(4): X is D and E for acidic amino acids
  MISC_FEATURE (5)..(5): X is A and G
  MISC_FEATURE (6)..(6): X is A and G
  MISC_FEATURE (7)..(7): X is F or P
  MISC_FEATURE (8)..(8): X is T or S
  MISC_FEATURE (9)..(9): X is C or S
  MISC_FEATURE (10)..(10): X is F or P
  MISC_FEATURE (11)..(11): X is F or P
  MISC_FEATURE (12)..(12): X is K, R or H for basic amino acids
  MISC_FEATURE (13)..(13): X is D and E for acidic amino acids
  MISC_FEATURE (14)..(14): X is K, R or H for basic amino acids
  MISC_FEATURE (15)..(15): X is T or S
  MISC_FEATURE (16)..(16): X is F, W or Y for aromatic amino acids
  MISC_FEATURE (17)..(17): X is N or Q for amidated amino acids
  MISC_FEATURE (18)..(18): X is GabaX for X2X3 or X3X2 or X2X3 or X3X2 or X3X3 or X2X2
  MISC_FEATURE (19)..(19): X is A and G
  MISC_FEATURE (20)..(20): X is A and G
XXXXXXXXXXXXXXXXXXXX

SEQ ID NO: 610 - protein, 19 aa, Artificial
  Completely synthesized peptide construct
  MISC_FEATURE (1)..(1): X is acetyl or propionyl group, D glycine or D alanine, cyclohexylalanine at amino terminus
  MISC_FEATURE (2)..(2): X is T or S
  MISC_FEATURE (3)..(3): X is GabaX for X2X3 or X3X2 or X2X3 or X3X2 or X3X3 or X2X2
  MISC_FEATURE (4)..(4): X is A and G
  MISC_FEATURE (5)..(5): X is A and G
  MISC_FEATURE (6)..(6): X is F or P
  MISC_FEATURE (7)..(7): X is T or S
  MISC_FEATURE (8)..(8): X is C or S
  MISC_FEATURE (9)..(9): X is F or P
  MISC_FEATURE (10)..(10): X is F or P
  MISC_FEATURE (11)..(11): X is K, R or H for basic amino acids
  MISC_FEATURE (12)..(12): X is D and E for acidic amino acids
  MISC_FEATURE (13)..(13): X is K, R or H for basic amino acids
  MISC_FEATURE (14)..(14): X is T or S
  MISC_FEATURE (15)..(15): X is F, W or Y for aromatic amino acids
  MISC_FEATURE (16)..(16): X is N or Q for amidated amino acids
  MISC_FEATURE (17)..(17): X is GabaX for X2X3 or X3X2 or X2X3 or X3X2 or X3X3 or X2X2
  MISC_FEATURE (18)..(18): X is A andG
  MISC_FEATURE (19)..(19): X is A andG
XXXXXXXXXXXXXXXXXXX

SEQ ID NO: 611 - protein, 15 aa, Artificial
  Completely synthesized peptide construct
ENPVVHFFKNIVTPR

SEQ ID NO: 612 - protein, 15 aa, Artificial
  Completely synthesized peptide construct
  MISC_FEATURE (1)..(1): X is D and E for acidic amino acids
  MISC_FEATURE (2)..(2): X is N or Q for amidated amino acids
  MISC_FEATURE (3)..(3): X is F or P
  MISC_FEATURE (4)..(4): X is I, L or V
  MISC_FEATURE (5)..(5): X is I, L or V
  MISC_FEATURE (6)..(6): X is K, R or H for basic amino acids
  MISC_FEATURE (7)..(7): X is F, W or Y for aromatic amino acids
  MISC_FEATURE (8)..(8): X is F, W or Y for aromatic amino acids
  MISC_FEATURE (9)..(9): X is K, R or H for basic amino acids
  MISC_FEATURE (10)..(10): X is N or Q for amidated amino acids
  MISC_FEATURE (11)..(11): X is I, L or V
  MISC_FEATURE (12)..(12): X is I, L or V
  MISC_FEATURE (13)..(13): X is T or S
  MISC_FEATURE (14)..(14): X is F or P
  MISC_FEATURE (15)..(15): X is K, R or H for basic amino acids
XXXXXXXXXXXXXXX

SEQ ID NO: 613 - protein, 14 aa, Artificial
  Completely synthesized peptide construct
  MISC_FEATURE (1)..(1): X is D and E for acidic amino acids
  MISC_FEATURE (2)..(2): X is N or Q for amidated amino acids
  MISC_FEATURE (3)..(3): X is F or P
  MISC_FEATURE (4)..(4): X is GabaX for X2X3 or X3X2 or X2X3 or X3X2 or X3X3 or X2X2
  MISC_FEATURE (5)..(5): X is K, R or H for basic amino acids
  MISC_FEATURE (6)..(6): X is F, W or Y for aromatic amino acids
  MISC_FEATURE (7)..(7): X is F, W or Y for aromatic amino acids
  MISC_FEATURE (8)..(8): X is K, R or H for basic amino acids
  MISC_FEATURE (9)..(9): X is N or Q for amidated amino acids
  MISC_FEATURE (10)..(10): X is I, L or V
  MISC_FEATURE (11)..(11): X is I, L or V
  MISC_FEATURE (12)..(12): X is T or S
  MISC_FEATURE (13)..(13): X is F or P
  MISC_FEATURE (14)..(14): X is K, R or H for basic amino acids
XXXXXXXXXXXXXX

SEQ ID NO: 614 - protein, 14 aa, Artificial
  Completely synthesized peptide construct
  MISC_FEATURE (1)..(1): X is D and E for acidic amino acids
  MISC_FEATURE (2)..(2): X is N or Q for amidated amino acids
  MISC_FEATURE (3)..(3): X is F or P
  MISC_FEATURE (4)..(4): X is I, L or V
  MISC_FEATURE (5)..(5): X is I, L or V
  MISC_FEATURE (6)..(6): X is K, R or H for basic amino acids
  MISC_FEATURE (7)..(7): X is K, R or H for basic amino acids
  MISC_FEATURE (8)..(8): X is K, R or H for basic amino acids
  MISC_FEATURE (9)..(9): X is N or Q for amidated amino acids
  MISC_FEATURE (9)..(9): X is K, R or H for basic amino acids
  MISC_FEATURE (10)..(10): X is N or Q for amidated amino acids
  MISC_FEATURE (11)..(11): X is GabaX for X2X3 or X3X2 or X2X3 or X3X2 or X3X3 or X2X2
  MISC_FEATURE (12)..(12): X is T or S
  MISC_FEATURE (13)..(13): X is F or P
  MISC_FEATURE (14)..(14): X is K, R or H for basic amino acids
XXXXXXXXXXXXXX

SEQ ID NO: 615 - protein, 13 aa, Artificial
  Completely synthesized peptide construct
  MISC_FEATURE (1)..(1): X is D and E for acidic amino acids
  MISC_FEATURE (2)..(2): X is N or Q for amidated amino acids
  MISC_FEATURE (3)..(3): X is F or P
  MISC_FEATURE (4)..(4): X is GabaX for X2X3 or X3X2 or X2X3 or X3X2 or X3X3 or X2X2
  MISC_FEATURE (5)..(5): X is K, R or H for basic amino acids
  MISC_FEATURE (6)..(6): X is F, W or Y for aromatic amino acids
  MISC_FEATURE (7)..(7): X is F, W or Y for aromatic amino acids
  MISC_FEATURE (8)..(8): X is K, R or H for basic amino acids
  MISC_FEATURE (9)..(9): X is N or Q for amidated amino acids
  MISC_FEATURE (10)..(10): X is GabaX for X2X3 or X3X2 or X2X3 or X3X2 or X3X3 or X2X2
  MISC_FEATURE (11)..(11): X is T or S
  MISC_FEATURE (12)..(12): X is F or P
  MISC_FEATURE (13)..(13): X is K, R or H for basic amino acids
XXXXXXXXXXXXX

SEQ ID NO: 616 - protein, 16 aa, Artificial
  Completely synthesized peptide construct
  MISC_FEATURE (1)..(1): X is acetyl or propionyl group, D glycine or D alanine, cyclohexylalanine at amino terminus
  MISC_FEATURE (2)..(2): X is D and E for acidic amino acids
  MISC_FEATURE (3)..(3): X is N or Q for amidated amino acids
  MISC_FEATURE (4)..(4): X is F or P
  MISC_FEATURE (5)..(5): X is I, L or V
  MISC_FEATURE (6)..(6): X is I, L or V
  MISC_FEATURE (7)..(7): X is K, R or H for basic amino acids
  MISC_FEATURE (8)..(8): X is F, W or Y for aromatic amino acids
  MISC_FEATURE (9)..(9): X is F, W or Y for aromatic amino acids
  MISC_FEATURE (10)..(10): X is K, R or H for basic amino acids
  MISC_FEATURE (11)..(11): X is N or Q for amidated amino acids
  MISC_FEATURE (12)..(12): X is I, L or V
  MISC_FEATURE (13)..(13): X is I, L or V
  MISC_FEATURE (14)..(14): X is T or S
  MISC_FEATURE (15)..(15): X is F or P
  MISC_FEATURE (16)..(16): X is K, R or H for basic amino acids
XXXXXXXXXXXXXXXX

SEQ ID NO: 617 - protein, 15 aa, Artificial
  Completely synthesized peptide construct
  MISC_FEATURE (1)..(1): X is acetyl or propionyl group, D glycine or D alanine, cyclohexylalanine at amino terminus
  MISC_FEATURE (2)..(2): X is D and E for acidic amino acids
  MISC_FEATURE (3)..(3): X is N or Q for amidated amino acids
  MISC_FEATURE (4)..(4): X is F or P
  MISC_FEATURE (5)..(5): X is GabaX for X2X3 or X3X2 or X2X3 or X3X2 or X3X3 or X2X2
  MISC_FEATURE (6)..(6): X is K, R or H for basic amino acids
  MISC_FEATURE (7)..(7): X is F, W or Y for aromatic amino acids
  MISC_FEATURE (8)..(8): X is F, W or Y for aromatic amino acids
  MISC_FEATURE (9)..(9): X is K, R or H for basic amino acids
  MISC_FEATURE (10)..(10): X is N or Q for amidated amino acids
  MISC_FEATURE (11)..(11): X is I, L or V
  MISC_FEATURE (12)..(12): X is I, L or V
  MISC_FEATURE (13)..(13): X is T or S
  MISC_FEATURE (14)..(14): X is F or P
  MISC_FEATURE (15)..(15): X is K, R or H for basic amino acids
XXXXXXXXXXXXXXX

SEQ ID NO: 618 - protein, 15 aa, Artificial
  Completely synthesized peptide construct
  MISC_FEATURE (1)..(1): X is acetyl or propionyl group, D glycine or D alanine, cyclohexylalanine at amino terminus
  MISC_FEATURE (2)..(2): X is D and E for acidic amino acids
  MISC_FEATURE (3)..(3): X is N or Q for amidated amino acids
  MISC_FEATURE (4)..(4): X is F or P
  MISC_FEATURE (5)..(5): X is I, L or V
  MISC_FEATURE (6)..(6): X is I, L or V
  MISC_FEATURE (7)..(7): X is K, R or H for basic amino acids
  MISC_FEATURE (8)..(8): X is F, W or Y for aromatic amino acids
  MISC_FEATURE (9)..(9): X is F, W or Y for aromatic amino acids
  MISC_FEATURE (10)..(10): X is K, R or H for basic amino acids
  MISC_FEATURE (11)..(11): X is N or Q for amidated amino acids
  MISC_FEATURE (12)..(12): X is GabaX for X2X3 or X3X2 or X2X3 or X3X2 or X3X3 or X2X2
  MISC_FEATURE (13)..(13): X is T or S
  MISC_FEATURE (14)..(14): X is F or P
  MISC_FEATURE (15)..(15): X is K, R or H for basic amino acids
XXXXXXXXXXXXXXX

SEQ ID NO: 619 - protein, 14 aa, Artificial
  Completely synthesized peptide construct
  MISC_FEATURE (1)..(1): X is acetyl or propionyl group, D glycine or D alanine, cyclohexylalanine at amino terminus
  MISC_FEATURE (2)..(2): X is D and E for acidic amino acids
  MISC_FEATURE (3)..(3): X is N or Q for amidated amino acids
  MISC_FEATURE (4)..(4): X is F or P
  MISC_FEATURE (5)..(5): X is GabaX for X2X3 or X3X2 or X2X3 or X3X2 or X3X3 or X2X2
  MISC_FEATURE (6)..(6): X is K, R or H for basic amino acids
  MISC_FEATURE (7)..(7): X is F, W or Y for aromatic amino acids
  MISC_FEATURE (8)..(8): X is F, W or Y for aromatic amino acids
  MISC_FEATURE (9)..(9): X is K, R or H for basic amino acids
  MISC_FEATURE (10)..(10): X is N or Q for amidated amino acids
  MISC_FEATURE (11)..(11): X is GabaX for X2X3 or X3X2 or X2X3 or X3X2 or X3X3 or X2X2
  MISC_FEATURE (12)..(12): X is T or S
  MISC_FEATURE (13)..(13): X is F or P
  MISC_FEATURE (14)..(14): X is K, R or H for basic amino acids
XXXXXXXXXXXXXX

SEQ ID NO: 620 - protein, 16 aa, Artificial
  Completely synthesized peptide construct
QSIAFPSKTSASIGSL

SEQ ID NO: 621 - protein, 16 aa, Artificial
  Completely synthesized peptide construct
  MISC_FEATURE (1)..(1): X is N or Q for amidated amino acids
  MISC_FEATURE (2)..(2): X is T or S
  MISC_FEATURE (3)..(3): X is I, L or V
  MISC_FEATURE (4)..(4): X is A and G
  MISC_FEATURE (5)..(5): X is GabaX for X2X3 or X3X2 or X2X3 or X3X2 or X3X3 or X2X2
  MISC_FEATURE (6)..(6): X is F or P
  MISC_FEATURE (7)..(7): X is T or S
  MISC_FEATURE (8)..(8): X is K, R or H for basic amino acids
  MISC_FEATURE (9)..(9): X is T or S
  MISC_FEATURE (10)..(10): X is T or S
  MISC_FEATURE (11)..(11): X is A and G
  MISC_FEATURE (12)..(12): X is T or S
  MISC_FEATURE (13)..(13): X is I, L or V
  MISC_FEATURE (14)..(14): X is A and G
  MISC_FEATURE (15)..(15): X is T or S
  MISC_FEATURE (16)..(16): X is I, L or V
XXXXXXXXXXXXXXXX

SEQ ID NO: 622 - protein, 17 aa, Artificial
  Completely synthesized peptide construct
  MISC_FEATURE (1)..(1): X is acetyl or propionyl group, D glycine or D alanine, cyclohexylalanine at amino terminus
  MISC_FEATURE (2)..(2): X is N or Q for amidated amino acids
  MISC_FEATURE (3)..(3): X is T or S
  MISC_FEATURE (4)..(4): X is I, L or V
  MISC_FEATURE (5)..(5): X is A and G
  MISC_FEATURE (6)..(6): X is F or P
  MISC_FEATURE (7)..(7): X is F or P
  MISC_FEATURE (8)..(8): X is T or S
  MISC_FEATURE (9)..(9): X is K, R or H for basic amino acids
  MISC_FEATURE (10)..(10): X is T or S
  MISC_FEATURE (11)..(11): X is T or S
  MISC_FEATURE (12)..(12): X is A and G
  MISC_FEATURE (13)..(13): X is T or S
  MISC_FEATURE (14)..(14): X is I, L or V
  MISC_FEATURE (15)..(15): X is A and G
  MISC_FEATURE (16)..(16): X is T or S
  MISC_FEATURE (17)..(17): X is I, L or V
XXXXXXXXXXXXXXXXX

SEQ ID NO: 623 - protein, 20 aa, Artificial
  Completely synthesized peptide construct
SKTSASIGSLCADARMYGVL

SEQ ID NO: 624 - protein, 19 aa, Artificial
  Completely synthesized peptide construct
  MISC_FEATURE (1)..(1): X is T or S
  MISC_FEATURE (2)..(2): X is K, R or H for basic amino acids
  MISC_FEATURE (3)..(3): X is T or S
  MISC_FEATURE (4)..(4): X is T or S
  MISC_FEATURE (5)..(5): X is A and G
  MISC_FEATURE (6)..(6): X is T or S
  MISC_FEATURE (7)..(7): X is I, L or V
  MISC_FEATURE (8)..(8): X is A and G
  MISC_FEATURE (9)..(9): X is T or S
  MISC_FEATURE (10)..(10): X is I, L or V
  MISC_FEATURE (11)..(11): X is C or S
  MISC_FEATURE (12)..(12): X is A and G
  MISC_FEATURE (13)..(13): X is D and E for acidic amino acids
  MISC_FEATURE (14)..(14): X is A and G
  MISC_FEATURE (15)..(15): X is K, R or H for basic amino acids
  MISC_FEATURE (16)..(16): X is M or Nle (Norleucine)
  MISC_FEATURE (17)..(17): X is F, W or Y for aromatic amino acids
  MISC_FEATURE (18)..(18): X is A and G
  MISC_FEATURE (19)..(19): X is I, L or V
XXXXXXXXXXXXXXXXXXX

SEQ ID NO: 625 - protein, 20 aa, Artificial
  Completely synthesized peptide construct
  MISC_FEATURE (1)..(1): X is acetyl or propionyl group, D glycine or D alanine, cyclohexylalanine at amino terminus
  MISC_FEATURE (2)..(2): X is T or S
  MISC_FEATURE (3)..(3): X is K, R or H for basic amino acids
  MISC_FEATURE (4)..(4): X is T or S
  MISC_FEATURE (5)..(5): X is T or S
  MISC_FEATURE (6)..(6): X is A and G
  MISC_FEATURE (7)..(7): X is T or S
  MISC_FEATURE (8)..(8): X is I, L or V
  MISC_FEATURE (9)..(9): X is A and G
  MISC_FEATURE (10)..(10): X is T or S
  MISC_FEATURE (11)..(11): X is I, L or V
  MISC_FEATURE (12)..(12): X is C or S
  MISC_FEATURE (13)..(13): X is A and G
  MISC_FEATURE (14)..(14): X is D and E for acidic amino acids
  MISC_FEATURE (15)..(15): X is A and G
  MISC_FEATURE (16)..(16): X is K, R or H for basic amino acids
  MISC_FEATURE (17)..(17): X is M or Nle (Norleucine)
  MISC_FEATURE (18)..(18): X is F, W or Y for aromatic amino acids
  MISC_FEATURE (19)..(19): X is A and G
  MISC_FEATURE (20)..(20): X is I, L or V
XXXXXXXXXXXXXXXXXXXX

SEQ ID NO: 626 - protein, 9 aa, Artificial
  Completely synthesized peptide construct
FFRDHSYQE

SEQ ID NO: 627 - protein, 9 aa, Artificial
  Completely synthesized peptide construct
  MISC_FEATURE (1)..(1): X is F or P
  MISC_FEATURE (2)..(2): X is F or P
  MISC_FEATURE (3)..(3): X is K, R or H for basic amino acids
  MISC_FEATURE (4)..(4): X is D and E for acidic amino acids
  MISC_FEATURE (5)..(5): X is K, R or H for basic amino acids
  MISC_FEATURE (6)..(6): X is T or S
  MISC_FEATURE (7)..(7): X is F, W or Y for aromatic amino acids
  MISC_FEATURE (8)..(8): X is N or Q for amidated amino acids
  MISC_FEATURE (9)..(9): X is D and E for acidic amino acids
XXXXXXXXX

SEQ ID NO: 628 - protein, 10 aa, Artificial
  Completely synthesized peptide construct
  MISC_FEATURE (1)..(1): X is acetyl or propionyl group, D glycine or D alanine, cyclohexylalanine at amino terminus
  MISC_FEATURE (2)..(2): X is F or P
  MISC_FEATURE (3)..(3): X is F or P
  MISC_FEATURE (4)..(4): X is K, R or H for basic amino acids
  MISC_FEATURE (5)..(5): X is D and E for acidic amino acids
  MISC_FEATURE (6)..(6): X is K, R or H for basjc amino acids
  MISC_FEATURE (7)..(7): X is T or S
  MISC_FEATURE (8)..(8): X is F, W or Y for aromatic amino acids
  MISC_FEATURE (9)..(9): X is N or Q for amidated amino acids
  MISC_FEATURE (10)..(10): X is D and E for acidic amino acids
XXXXXXXXXX

SEQ ID NO: 629 - protein, 15 aa, Artificial
  Completely synthesized peptide construct
ENPVVHFFKNIVTPR

SEQ ID NO: 630 - protein, 14 aa, Artificial
  Completely synthesized peptide construct
  MISC_FEATURE (1)..(1): X is D and E for acidic amino acids
  MISC_FEATURE (2)..(2): X is N or Q for amidated amino acids
  MISC_FEATURE (3)..(3): X is F or P
  MISC_FEATURE (4)..(4): X is I, L or V
  MISC_FEATURE (5)..(5): X is I, L or V
  MISC_FEATURE (6)..(6): X is K, R or H for basic amino acids
  MISC_FEATURE (7)..(7): X is F or P
  MISC_FEATURE (8)..(8): X is F or P
  MISC_FEATURE (9)..(9): X is K, R or H for basic amino acids
  MISC_FEATURE (10)..(10): X is N or Q for amidated amino acids
  MISC_FEATURE (11)..(11): X is I, L or V
  MISC_FEATURE (12)..(12): X is I, L or V
  MISC_FEATURE (13)..(13): X is T or S
  MISC_FEATURE (14)..(14): X is F or P
XXXXXXXXXXXXXX

SEQ ID NO: 631 - protein, 13 aa, Artificial
  Completely synthesized peptide construct
  MISC_FEATURE (1)..(1): X is D and E for acidic amino acids
  MISC_FEATURE (2)..(2): X is N or Q for amidated amino acids
  MISC_FEATURE (3)..(3): X is F or P
  MISC_FEATURE (4)..(4): X is GabaX for X2X3 or X3X2 or X2X3 or X3X2 or X3X3 or X2X2
  MISC_FEATURE (5)..(5): X is K, R or H for basic amino acids
  MISC_FEATURE (6)..(6): X is F or P
  MISC_FEATURE (7)..(7): X is F or P
  MISC_FEATURE (8)..(8): X is K, R or H for basic amino acids
  MISC_FEATURE (9)..(9): X is N or Q for amidated amino acids
  MISC_FEATURE (10)..(10): X is I, L or V
  MISC_FEATURE (11)..(11): X is I, L or V
  MISC_FEATURE (12)..(12): X is T or S
  MISC_FEATURE (13)..(13): X is F or P
XXXXXXXXXXXXX

SEQ ID NO: 632 - protein, 13 aa, Artificial
  Completely synthesized peptide construct
  MISC_FEATURE (1)..(1): X is D and E for acidic amino acids
  MISC_FEATURE (2)..(2): X is N or Q for amidated amino acids
  MISC_FEATURE (3)..(3): X is F or P
  MISC_FEATURE (4)..(4): X is I, L or V
  MISC_FEATURE (5)..(5): X is I, L or V
  MISC_FEATURE (6)..(6): X is K, R or H for basic amino acids
  MISC_FEATURE (7)..(7): X is F or P
  MISC_FEATURE (8)..(8): X is F or P
  MISC_FEATURE (9)..(9): X is K, R or H for basic amino acids
  MISC_FEATURE (10)..(10): X is N or Q for amidated amino acids
  MISC_FEATURE (11)..(11): X is GabaX for X2X3 or X3X2 or X2X3 or X3X2 or X3X3 or X2X2
  MISC_FEATURE (12)..(12): X is T or S
  MISC_FEATURE (13)..(13): X is F or P
XXXXXXXXXXXXX

SEQ ID NO: 633 - protein, 12 aa, Artificial
  Completely synthesized peptide construct
  MISC_FEATURE (1)..(1): X is D and E for acidic amino acids
  MISC_FEATURE (2)..(2): X is N or Q for amidated amino acids
  MISC_FEATURE (3)..(3): X is F or P
  MISC_FEATURE (4)..(4): X is GabaX for X2X3 or X3X2 or X2X3 or X3X2 or X3X3 or X2X2
  MISC_FEATURE (5)..(5): X is K, R or H for basic amino acids
  MISC_FEATURE (6)..(6): X is F or P
  MISC_FEATURE (7)..(7): X is F or P
  MISC_FEATURE (8)..(8): X is K, R or H for basic amino acids
  MISC_FEATURE (9)..(9): X is N or Q for amidated amino acids
  MISC_FEATURE (10)..(10): X is GabaX for X2X3 or X3X2 or X2X3 or X3X2 or X3X3 or X2X2
  MISC_FEATURE (11)..(11): X is T or S
  MISC_FEATURE (12)..(12): X is F or P
XXXXXXXXXXXX

SEQ ID NO: 634 - protein, 15 aa, Artificial
  Completely synthesized peptide construct
  MISC_FEATURE (1)..(1): X is acetyl or propionyl group, D glycine or D alanine, cyclohexylalanine at amino terminus
  MISC_FEATURE (2)..(2): X is D and E for acidic amino acids
  MISC_FEATURE (3)..(3): X is N or Q for amidated amino acids
  MISC_FEATURE (4)..(4): X is F or P
  MISC_FEATURE (5)..(5): X is I, L or V
  MISC_FEATURE (6)..(6): X is I, L or V
  MISC_FEATURE (7)..(7): X is K, R or H for basic amino acids
  MISC_FEATURE (8)..(8): X is F or P
  MISC_FEATURE (9)..(9): X is F or P
  MISC_FEATURE (10)..(10): X is K, R or H for basic amino acids
  MISC_FEATURE (11)..(11): X is N or Q for amidated amino acids
  MISC_FEATURE (12)..(12): X is I, L or V
  MISC_FEATURE (13)..(13): X is I, L or V
  MISC_FEATURE (14)..(14): X is T or S
  MISC_FEATURE (15)..(15): X is F or P
XXXXXXXXXXXXXXX

SEQ ID NO: 635 - protein, 14 aa, Artificial
  Completely synthesized peptide construct
  MISC_FEATURE (1)..(1): X is acetyl or propionyl group, D glycine or D alanine, cyclohexylalanine at amino terminus
  MISC_FEATURE (2)..(2): X is D and E for acidic amino acids
  MISC_FEATURE (3)..(3): X is N or Q for amidated amino acids
  MISC_FEATURE (4)..(4): X is F or P
  MISC_FEATURE (5)..(5): X is GabaX for X2X3 or X3X2 or X2X3 or X3X2 or X3X3 or X2X2
  MISC_FEATURE (6)..(6): X is K, R or H for basic amino acids
  MISC_FEATURE (7)..(7): X is F or P
  MISC_FEATURE (8)..(8): X is F or P
  MISC_FEATURE (9)..(9): X is K, R or H for basic amino acids
  MISC_FEATURE (10)..(10): X is N or Q for amidated amino acids
  MISC_FEATURE (11)..(11): X is I, L or V
  MISC_FEATURE (12)..(12): X is I, L or V
  MISC_FEATURE (13)..(13): X is T or S
  MISC_FEATURE (14)..(14): X is F or P
XXXXXXXXXXXXXX

SEQ ID NO: 636 - protein, 14 aa, Artificial
  Completely synthesized peptide construct
  MISC_FEATURE (1)..(1): X is acetyl or propionyl group, D glycine or D alanine, cyclohexylalanine at amino terminus
  MISC_FEATURE (2)..(2): X is D and E for acidic amino acids
  MISC_FEATURE (3)..(3): X is N or Q for amidated amino acids
  MISC_FEATURE (4)..(4): X is F or P
  MISC_FEATURE (5)..(5): X is I, L or V
  MISC_FEATURE (6)..(6): X is I, L or V
  MISC_FEATURE (7)..(7): X is K, R or H for basic amino acids
  MISC_FEATURE (8)..(8): X is F or P
  MISC_FEATURE (9)..(9): X is F or P
  MISC_FEATURE (10)..(10): X is K, R or H for basic amino acids
  MISC_FEATURE (11)..(11): X is N or Q for amidated amino acids
  MISC_FEATURE (12)..(12): X is GabaX for X2X3 or X3X2 or X2X3 or X3X2 or X3X3 or X2X2
  MISC_FEATURE (13)..(13): X is T or S
  MISC_FEATURE (14)..(14): X is F or P
XXXXXXXXXXXXXX

SEQ ID NO: 637 - protein, 13 aa, Artificial
  Completely synthesized peptide construct
  MISC_FEATURE (1)..(1): X is acetyl or propionyl group, D glycine or D alanine, cyclohexylalanine at amino terminus
  MISC_FEATURE (2)..(2): X is D and E for acidic amino acids
  MISC_FEATURE (3)..(3): X is N or Q for amidated amino acids
  MISC_FEATURE (4)..(4): X is F or P
  MISC_FEATURE (5)..(5): X is GabaX for X2X3 or X3X2 or X2X3 or X3X2 or X3X3 or X2X2
  MISC_FEATURE (6)..(6): X is K, R or H for basic amino acids
  MISC_FEATURE (7)..(7): X is F or P
  MISC_FEATURE (8)..(8): X is F or P
  MISC_FEATURE (9)..(9): X is K, R or H for basic amino acids
  MISC_FEATURE (10)..(10): X is N or Q for amidated amino acids
  MISC_FEATURE (11)..(11): X is GabaX for X2X3 or X3X2 or X2X3 or X3X2 or X3X3 or X2X2
  MISC_FEATURE (12)..(12): X is T or S
  MISC_FEATURE (13)..(13): X is F or P
XXXXXXXXXXXXX

SEQ ID NO: 638 - protein, 21 aa, Artificial
  Completely synthesized peptide construct
TGTEKLIETYFSKNYQDYEYL

SEQ ID NO: 639 - protein, 21 aa, Artificial
  Completely synthesized peptide construct
  MISC_FEATURE (1)..(1): X is T or S
  MISC_FEATURE (2)..(2): X is A and G
  MISC_FEATURE (3)..(3): X is T or S
  MISC_FEATURE (4)..(4): X is D and E for acidic amino acids
  MISC_FEATURE (5)..(5): X is K, R or H for basic amino acids
  MISC_FEATURE (6)..(6): X is I, L or V
  MISC_FEATURE (7)..(7): X is I, L or V
  MISC_FEATURE (8)..(8): X is D and E for acidic amino acids
  MISC_FEATURE (9)..(9): X is T or S
  MISC_FEATURE (10)..(10): X is F, W or Y for aromatic amino acids
  MISC_FEATURE (11)..(11): X is F, W or Y for aromatic amino acids
  MISC_FEATURE (12)..(12): X is T or S
  MISC_FEATURE (13)..(13): X is K, R or H for basic amino acids
  MISC_FEATURE (14)..(14): X is N or Q for amidated amino acids
  MISC_FEATURE (15)..(15): X is F, W or Y for aromatic amino acids
  MISC_FEATURE (16)..(16): X is N or Q for amidated amino acids
  MISC_FEATURE (17)..(17): X is D and E for acidic amino acids
  MISC_FEATURE (18)..(18): X is F, W or Y for aromatic amino acids
  MISC_FEATURE (19)..(19): X is D and E for acidic amino acids
  MISC_FEATURE (20)..(20): X is F, W or Y for aromatic amino acids
  MISC_FEATURE (21)..(21): X is I, L or V
XXXXXXXXXXXXXXXXXXXXX

SEQ ID NO: 640 - protein, 21 aa, Artificial
  Completely synthesized peptide construct
  MISC_FEATURE (1)..(1): X is T or S
  MISC_FEATURE (2)..(2): X is A and G
  MISC_FEATURE (3)..(3): X is T or S
  MISC_FEATURE (4)..(4): X is D and E for acidic amino acids
  MISC_FEATURE (5)..(5): X is K, R or H for basic amino acids
  MISC_FEATURE (6)..(6): X is I, L or V
  MISC_FEATURE (7)..(7): X is I, L or V
  MISC_FEATURE (8)..(8): X is D and E for acidic amino acids
  MISC_FEATURE (9)..(9): X is T or S
  MISC_FEATURE (10)..(10): X is F, W or Y for aromatic amino acids
  MISC_FEATURE (11)..(11): X is F, W or Y for aromatic amino acids
  MISC_FEATURE (12)..(12): X is T or S
  MISC_FEATURE (13)..(13): X is K, R or H for basic amino acids
  MISC_FEATURE (14)..(14): X is N or Q for amidated amino acids
  MISC_FEATURE (15)..(15): X is F, W or Y for aromatic amino acids
  MISC_FEATURE (16)..(16): X is N or Q for amidated amino acids
  MISC_FEATURE (17)..(17): X is D and E for acidic amino acids
  MISC_FEATURE (18)..(18): X is F, W or Y for aromatic amino acids
  MISC_FEATURE (19)..(19): X is D and E for acidic amino acids
  MISC_FEATURE (20)..(20): X is F, W or Y for aromatic amino acids
  MISC_FEATURE (21)..(21): X is I, L or V
XXXXXXXXXXXXXXXXXXXXX

SEQ ID NO: 641 - protein, 20 aa, Artificial
  Completely synthesized peptide construct
  MISC_FEATURE (1)..(1): X is T or S
  MISC_FEATURE (2)..(2): X is A and G
  MISC_FEATURE (3)..(3): X is T or S
  MISC_FEATURE (4)..(4): X is D and E for acidic amino acids
  MISC_FEATURE (5)..(5): X is K, R or H for basic amino acids
  MISC_FEATURE (6)..(6): X is GabaX  for X2X3 or X3X2 or X2X3 or X3X2 or X3X3 or X2X2
  MISC_FEATURE (7)..(7): X is D and E for acidic amino acids
  MISC_FEATURE (8)..(8): X is T or S
  MISC_FEATURE (9)..(9): X is F, W or Y for aromatic amino acids
  MISC_FEATURE (10)..(10): X is F, W or Y for aromatic amino acids
  MISC_FEATURE (11)..(11): X is T or S
  MISC_FEATURE (12)..(12): X is K, R or H for basic amino acids
  MISC_FEATURE (13)..(13): X is N or Q for amidated amino acids
  MISC_FEATURE (14)..(14): X is F, W or Y for aromatic amino acids
  misc_feature (15)..(15): Xaa can be any naturally occurring amino acid
  MISC_FEATURE (16)..(16): X is D and E for acidic amino acids
  MISC_FEATURE (17)..(17): X is F, W or Y or aromatic amino acids
  MISC_FEATURE (18)..(18): X is D and E for acidic amino acids
  MISC_FEATURE (19)..(19): X is F, W or Y for aromatic amino acids
  MISC_FEATURE (20)..(20): X is I, L or V
XXXXXXXXXXXXXXXXXXXX

SEQ ID NO: 642 - protein, 20 aa, Artificial
  Completely synthesized peptide construct
  MISC_FEATURE (1)..(1): X is T or S
  MISC_FEATURE (2)..(2): X is A and G
  MISC_FEATURE (3)..(3): X is T or S
  MISC_FEATURE (4)..(4): X is D and E for acidic amino acids
  MISC_FEATURE (5)..(5): X is K, R or H for basic amino acids
  MISC_FEATURE (6)..(6): X is I, L or V
  MISC_FEATURE (7)..(7): X is GabaX for X2X3 or X3X2 or X2X3 or X3X2 or X3X3 or X2X2
  MISC_FEATURE (8)..(8): X is T or S
  MISC_FEATURE (9)..(9): X is F, W or Y for aromatic amino acids
  MISC_FEATURE (10)..(10): X is F, W or Y for aromatic amino acids
  MISC_FEATURE (11)..(11): X is T or S
  MISC_FEATURE (12)..(12): X is K, R or H for basic amino acids
  MISC_FEATURE (13)..(13): X is N or Q for amidated amino acids
  MISC_FEATURE (14)..(14): X is F, W or Y for aromatic amino acids
  MISC_FEATURE (15)..(15): X is T or S
  MISC_FEATURE (16)..(16): X is D and E for acidic amino acids
  MISC_FEATURE (17)..(17): X is F, W or Y for aromatic amino acids
  MISC_FEATURE (18)..(18): X is D and E for acidic amino acids
  MISC_FEATURE (19)..(19): X is F, W or Y for aromatic amino acids
  MISC_FEATURE (20)..(20): X is I, L or V
XXXXXXXXXXXXXXXXXXXX

SEQ ID NO: 643 - protein, 19 aa, Artificial
  Completely synthesized peptide construct
  MISC_FEATURE (1)..(1): X is T or S
  MISC_FEATURE (2)..(2): X is A and G
  MISC_FEATURE (3)..(3): X is T or S
  MISC_FEATURE (4)..(4): X is D and E for acidic amino acids
  MISC_FEATURE (5)..(5): X is K, R or H for basic amino acids
  MISC_FEATURE (6)..(6): X is 5-aminopentanoic acid for replacement of 3 or 4 amino acids of X2 and X3
  MISC_FEATURE (7)..(7): X is T or S
  MISC_FEATURE (8)..(8): X is F, W or Y for aromatic amino acids
  MISC_FEATURE (9)..(9): X is F, W or Y for aromatic amino acids
  MISC_FEATURE (10)..(10): X is T or S
  MISC_FEATURE (11)..(11): X is K, R or H for basic amino acids
  MISC_FEATURE (12)..(12): X is N or Q for amidated amino acids
  MISC_FEATURE (13)..(13): X is F, W or Y for aromatic amino acids
  MISC_FEATURE (14)..(14): X is N or Q for amidated amino acids
  MISC_FEATURE (15)..(15): X is D and E for acidic amino acids
  MISC_FEATURE (16)..(16): X is F, W or Y for aromatic amino acids
  MISC_FEATURE (17)..(17): X is D and E for acidic amino acids
  MISC_FEATURE (18)..(18): X is F, W or Y for aromatic amino acids
  MISC_FEATURE (19)..(19): X is I, L or V
XXXXXXXXXXXXXXXXXXX

SEQ ID NO: 644 - protein, 22 aa, Artificial
  Completely synthesized peptide construct
  MISC_FEATURE (1)..(1): X is acetyl or propionyl group, D glycine or D alanine, cyclohexylalanine at amino terminus
  MISC_FEATURE (2)..(2): X is T or S
  MISC_FEATURE (3)..(3): X is A and G
  MISC_FEATURE (4)..(4): X is T or S
  MISC_FEATURE (5)..(5): X is D and E for acidic amino acids
  MISC_FEATURE (6)..(6): X is K, R or H for basic amino acids
  MISC_FEATURE (7)..(7): X is I, L or V
  MISC_FEATURE (8)..(8): X is I, L or V
  MISC_FEATURE (9)..(9): X is D and E for acidic amino acids
  MISC_FEATURE (10)..(10): X is T or S
  MISC_FEATURE (11)..(11): X is F, W or Y for aromatic amino acids
  MISC_FEATURE (12)..(12): X is F, W or Y for aromatic amino acids
  MISC_FEATURE (13)..(13): X is T or S
  MISC_FEATURE (14)..(14): X is K, R or H for basic amino acids
  MISC_FEATURE (15)..(15): X is N or Q for amidated amino acids
  MISC_FEATURE (16)..(16): X is F, W or Y for aromatic amino acids
  MISC_FEATURE (17)..(17): X is N or Q for amidated amino acids
  MISC_FEATURE (18)..(18): X is D and E for acidic amino acids
  MISC_FEATURE (19)..(19): X is F, W or Y for aromatic amino acids
  MISC_FEATURE (20)..(20): X is D and E for acidic amino acids
  MISC_FEATURE (21)..(21): X is F, W or Y for aromatic amino acids
  MISC_FEATURE (22)..(22): X is I, L or V
XXXXXXXXXXXXXXXXXXXXXX

SEQ ID NO: 645 - protein, 22 aa, Artificial
  Completely synthesized peptide construct
  MISC_FEATURE (1)..(1): X is acetly or propionyl group, D glycine or D alanine, cyclohexylalanine at amino terminus
  MISC_FEATURE (2)..(2): X is T or S
  MISC_FEATURE (3)..(3): X is A and G
  MISC_FEATURE (4)..(4): X is T or S
  MISC_FEATURE (5)..(5): X is D and E for acidic amino acids
  MISC_FEATURE (6)..(6): X is K, R or H for basic amino acids
  MISC_FEATURE (7)..(7): X is I, L or V
  MISC_FEATURE (8)..(8): X is I, L or V
  MISC_FEATURE (9)..(9): X is D and E for acidic amino acids
  MISC_FEATURE (10)..(10): X is T or S
  MISC_FEATURE (11)..(11): X is F, W or Y for aromatic amino acids
  MISC_FEATURE (12)..(12): X is F, W or Y for aromatic amino acids
  MISC_FEATURE (13)..(13): X is T or S
  MISC_FEATURE (14)..(14): X is K, R or H for basic amino acids
  MISC_FEATURE (15)..(15): X is N or Q for amidated amino acids
  MISC_FEATURE (16)..(16): X is F, W or Y for aromatic amino acids
  MISC_FEATURE (17)..(17): X is N or Q for amidated amino acids
  MISC_FEATURE (18)..(18): X is D and E for acidic amino acids
  MISC_FEATURE (19)..(19): X is F, W or Y for aromatic amino acids
  MISC_FEATURE (20)..(20): X is D and E for acidic amino acids
  MISC_FEATURE (21)..(21): X is F, W or Y for aromatic amino acids
  MISC_FEATURE (22)..(22): X is I, L or V
XXXXXXXXXXXXXXXXXXXXXX

SEQ ID NO: 646 - protein, 21 aa, Artificial
  Completely synthesized peptide construct
  MISC_FEATURE (1)..(1): X is acetyl or propionyl group, D glycine or D alanine, cyclohexylalanine at amino terminus
  MISC_FEATURE (2)..(2): X is T or S
  MISC_FEATURE (3)..(3): X is A and G
  MISC_FEATURE (4)..(4): X is T or S
  MISC_FEATURE (5)..(5): X is D and E for acidic amino acids
  MISC_FEATURE (6)..(6): X is K, R or H for basic amino acids
  MISC_FEATURE (7)..(7): X is GabaX2 for X2X3 or X3X2 or X2X3 or X3X2 or X3X3 or X2X2
  MISC_FEATURE (8)..(8): X is D and E for acidic amino acids
  MISC_FEATURE (9)..(9): X is T or S
  MISC_FEATURE (10)..(10): X is F, W or Y for aromatic amino acids
  MISC_FEATURE (11)..(11): X is F, W or Y for aromatic amino acids
  MISC_FEATURE (12)..(12): X is T or S
  MISC_FEATURE (13)..(13): X is K, R or H for basic amino acids
  MISC_FEATURE (14)..(14): X is N or Q for amidated amino acids
  MISC_FEATURE (15)..(15): X is F, W or Y for aromatic amino acids
  MISC_FEATURE (16)..(16): X is N or Q for amidated amino acids
  MISC_FEATURE (17)..(17): X is D and E for acidic amino acids
  MISC_FEATURE (18)..(18): X is F, W or Y for aromatic amino acids
  MISC_FEATURE (19)..(19): X is D and E for aciidic amino acids
  MISC_FEATURE (20)..(20): X is F, W or Y for aromatic amino acids
  MISC_FEATURE (21)..(21): X is I, L or V
XXXXXXXXXXXXXXXXXXXXX

SEQ ID NO: 647 - protein, 21 aa, Artificial
  Completely synthesized peptide construct
  MISC_FEATURE (1)..(1): X is acetyl or propionyl group, D glycine or D alanine, cyclohexylalanine at amino terminus
  MISC_FEATURE (2)..(2): X is T or S
  MISC_FEATURE (3)..(3): X is A and G
  MISC_FEATURE (4)..(4): X is T or S
  MISC_FEATURE (5)..(5): X is D and E for acidic amino acids
  MISC_FEATURE (6)..(6): X is K, R or H for basic amino acids
  MISC_FEATURE (7)..(7): X is I, L or V
  MISC_FEATURE (8)..(8): X is GabaX for X2X3 or X3X2 or X2X3 or X3X2 or X3X3 or X2X2
  MISC_FEATURE (9)..(9): X is T or S
  MISC_FEATURE (10)..(10): X is F, W or Y for aromatic amino acids
  MISC_FEATURE (11)..(11): X is F, W or Y for aromatic amino acids
  MISC_FEATURE (12)..(12): X is T or S
  MISC_FEATURE (13)..(13): X is K, R or H for basic amino acids
  MISC_FEATURE (14)..(14): X is N or Q for amidated amino acids
  MISC_FEATURE (15)..(15): X is F, W or Y for aromatic amino acids
  MISC_FEATURE (16)..(16): X is N or Q for amidated amino acids
  MISC_FEATURE (17)..(17): X is D and E for acidic amino acids
  MISC_FEATURE (18)..(18): X is F, W or Y for aromatic amino acids
  MISC_FEATURE (19)..(19): X is D and E for acidic amino acids
  MISC_FEATURE (20)..(20): X is F, W or Y for aromatic amino acids
  MISC_FEATURE (21)..(21): X is I, L or V
XXXXXXXXXXXXXXXXXXXXX

SEQ ID NO: 648 - protein, 20 aa, Artificial
  Completely synthesized peptide construct
  MISC_FEATURE (1)..(1): X is acetyl or propionyl group, D glycine or D alanine, cyclohexylalanine at amino terminus
  MISC_FEATURE (2)..(2): X is T or S
  MISC_FEATURE (3)..(3): X is A and G
  MISC_FEATURE (4)..(4): X is T or S
  MISC_FEATURE (5)..(5): X is D and E for acidic amino acids
  MISC_FEATURE (6)..(6): X is K, R or H for basic amino acids
  MISC_FEATURE (7)..(7): X is 5-aminopentanoic acid for replacement of 3 or 4 amino acids of X2 and X3
  MISC_FEATURE (8)..(8): X is T or S
  MISC_FEATURE (9)..(9): X is F, W or Y for aromatic amino acids
  MISC_FEATURE (10)..(10): X is F, W or Y for aromatic amino acids
  MISC_FEATURE (11)..(11): X is T or S
  MISC_FEATURE (12)..(12): X is K, R or H for basic amino acids
  MISC_FEATURE (13)..(13): X is N or Q for amidated amino acids
  MISC_FEATURE (14)..(14): X is F, W or Y for aromatic amino acids
  MISC_FEATURE (15)..(15): X is N or Q for amidated amino acids
  MISC_FEATURE (16)..(16): X is D and E for acidic amino acids
  MISC_FEATURE (17)..(17): X is F, W or Y for aromatic amino acids
  MISC_FEATURE (18)..(18): X is D and E for basic amino acids
  MISC_FEATURE (19)..(19): X is F, W or Y for aromatic amino acids
  MISC_FEATURE (20)..(20): X is I, L or V
XXXXXXXXXXXXXXXXXXXX

SEQ ID NO: 649 - protein, 13 aa, Artificial
  Completely synthesized peptide construct
HSLGKWLGHPDKF

SEQ ID NO: 650 - protein, 13 aa, Artificial
  Completely synthesized peptide construct
  MISC_FEATURE (1)..(1): X is K, R or H for basic amino acids
  MISC_FEATURE (2)..(2): X is T or S
  MISC_FEATURE (3)..(3): X is I, L or V
  MISC_FEATURE (4)..(4): X is A and G
  MISC_FEATURE (5)..(5): X is K, R or H for basic amino acids
  MISC_FEATURE (6)..(6): X is F, W or Y for aromatic amino acids
  MISC_FEATURE (7)..(7): X is I, L or V
  MISC_FEATURE (8)..(8): X is A and G
  MISC_FEATURE (9)..(9): X is K, R or H for basic amino acids
  MISC_FEATURE (10)..(10): X is F or P
  MISC_FEATURE (11)..(11): X is D and E for acidic amino acids
  MISC_FEATURE (12)..(12): X is K, R or H for basic amino acids
  MISC_FEATURE (13)..(13): X is F or P
XXXXXXXXXXXXX

SEQ ID NO: 651 - protein, 14 aa, Artificial
  Completely synthesized peptide construct
  MISC_FEATURE (1)..(1): X is acetyl or propionyl group, D glycine or D alanine, cyclohexylalanine at amino terminus
  MISC_FEATURE (2)..(2): X is K, R or H for basic amino acids
  MISC_FEATURE (3)..(3): X is T or S
  MISC_FEATURE (4)..(4): X is I, L or V
  MISC_FEATURE (5)..(5): X is A and G
  MISC_FEATURE (6)..(6): X is K, R or H for basic amino acids
  MISC_FEATURE (7)..(7): X is F, W or Y for aromatic amino acids
  MISC_FEATURE (8)..(8): X is I, L or V
  MISC_FEATURE (9)..(9): X is A and G
  MISC_FEATURE (10)..(10): X is K, R or H for basic amino acids
  MISC_FEATURE (11)..(11): X is F or P
  MISC_FEATURE (12)..(12): X is D and E for acidic amino acids
  MISC_FEATURE (13)..(13): X is K, R or H for basic amino acids
  MISC_FEATURE (14)..(14): X is F or P
XXXXXXXXXXXXXX

SEQ ID NO: 652 - protein, 16 aa, Artificial
  Completely synthesized peptide construct
VGWYRPPFSRVVHLYR

SEQ ID NO: 653 - protein, 16 aa, Artificial
  Completely synthesized peptide construct
  MISC_FEATURE (1)..(1): X is I, L or V
  MISC_FEATURE (2)..(2): X is A and G
  MISC_FEATURE (3)..(3): X is F, W or Y for aromatic amino acids
  MISC_FEATURE (4)..(4): X is F, W or Y for aromatic amino acids
  MISC_FEATURE (5)..(5): X is K, R or H for basic amino acids
  MISC_FEATURE (6)..(6): X is F or P
  MISC_FEATURE (7)..(7): X is F or P
  MISC_FEATURE (8)..(8): X is F or P
  MISC_FEATURE (9)..(9): X is T or S
  MISC_FEATURE (10)..(10): X is K, R or H for basic amino acids
  MISC_FEATURE (11)..(11): X is I, L or V
  MISC_FEATURE (12)..(12): X is I, L or V
  MISC_FEATURE (13)..(13): X is K, R or H for basic amino acids
  MISC_FEATURE (14)..(14): X is I, L or V
  MISC_FEATURE (15)..(15): X is F, W or Y for aromatic amino acids
  MISC_FEATURE (16)..(16): X is K, R or H for basic amino acids
XXXXXXXXXXXXXXXX

SEQ ID NO: 654 - protein, 15 aa, Artificial
  Completely synthesized peptide construct
  MISC_FEATURE (1)..(1): X is I, L or V
  MISC_FEATURE (2)..(2): X is A and G
  MISC_FEATURE (3)..(3): X is F, W or Y for aromatic amino acids
  MISC_FEATURE (4)..(4): X is F, W or Y for aromatic amino acids
  MISC_FEATURE (5)..(5): X is K, R or H for basic amino acids
  MISC_FEATURE (6)..(6): X is F or P
  MISC_FEATURE (7)..(7): X is F or P
  MISC_FEATURE (8)..(8): X is F or P
  MISC_FEATURE (9)..(9): X is T or S
  MISC_FEATURE (10)..(10): X is K, R or H for basic amino acids
  MISC_FEATURE (11)..(11): X is GabaX for X2X3 or X3X2 or X2X3 or X3X2 or X3X3 or X2X2
  MISC_FEATURE (12)..(12): X is K, R or H for basic amino acids
  MISC_FEATURE (13)..(13): X is I, L or V
  MISC_FEATURE (14)..(14): X is F, W or Y for aromatic amino acids
  MISC_FEATURE (15)..(15): X is K, R or H for basic amino acids
XXXXXXXXXXXXXXX

SEQ ID NO: 655 - protein, 17 aa, Artificial
  Completely synthesized peptide construct
  MISC_FEATURE (1)..(1): X is acetyl or propionyl group, D glycine or D alanine, cyclohexylalanine at amino terminus
  MISC_FEATURE (2)..(2): X is I, L or V
  MISC_FEATURE (3)..(3): X is A and G
  MISC_FEATURE (4)..(4): X is F, W or Y for aromatic amino acids
  MISC_FEATURE (5)..(5): X is F, W or Y for aromatic amino acids
  MISC_FEATURE (6)..(6): X is F, W or Y for aromatic amino acids
  MISC_FEATURE (7)..(7): X is F or P
  MISC_FEATURE (8)..(8): X is F or P
  MISC_FEATURE (9)..(9): X is F or P
  MISC_FEATURE (10)..(10): X is T or S
  MISC_FEATURE (11)..(11): X is K, R or H for basic amino acids
  MISC_FEATURE (12)..(12): X is I, L or V
  MISC_FEATURE (13)..(13): X is I, L or V
  MISC_FEATURE (14)..(14): X is K, R or H for basic amino acids
  MISC_FEATURE (15)..(15): X is I, L or V
  MISC_FEATURE (16)..(16): X is F, W or Y for aromatic amino acids
  MISC_FEATURE (17)..(17): X is K, R or H for basic amino acids
XXXXXXXXXXXXXXXXX

SEQ ID NO: 656 - protein, 16 aa, Artificial
  Completely synthesized peptide construct
  MISC_FEATURE (1)..(1): X is acetyl or propionyl group, D glycine or D alanine, cyclohexylalanine at amino terminus
  MISC_FEATURE (2)..(2): X is I, L or V
  MISC_FEATURE (3)..(3): X is A and G
  MISC_FEATURE (4)..(4): X is F, W or Y for aromatic amino acids
  MISC_FEATURE (5)..(5): X is F, W or Y for aromatic amino acids
  MISC_FEATURE (6)..(6): X is K, R or H for basic amino acids
  MISC_FEATURE (7)..(7): X is F or P
  MISC_FEATURE (8)..(8): X is F or P
  MISC_FEATURE (9)..(9): X is F or P
  MISC_FEATURE (10)..(10): X is T or S
  MISC_FEATURE (11)..(11): X is K, R or H for basic amino acids
  MISC_FEATURE (12)..(12): X is GabaX for X2X3 or X3X2 or X2X3 or X3X2 or X3X3 or X2X2
  MISC_FEATURE (13)..(13): X is K, R or H for basic amino acids
  MISC_FEATURE (14)..(14): X is I, L or V
  MISC_FEATURE (15)..(15): X is F, W or Y for aromatic amino acids
  MISC_FEATURE (16)..(16): X is K, R or H for basic amino acids
XXXXXXXXXXXXXXXX

SEQ ID NO: 657 - protein, 16 aa, Artificial
  Completely synthesized peptide construct
VFLCLQYRLRGKLRAE

SEQ ID NO: 658 - protein, 16 aa, Artificial
  Completely synthesized peptide construct
  MISC_FEATURE (1)..(1): X is I, L or V
  MISC_FEATURE (2)..(2): X is F or P
  MISC_FEATURE (3)..(3): X is I, L or V
  MISC_FEATURE (4)..(4): X is C or S
  MISC_FEATURE (5)..(5): X is I, L or V
  MISC_FEATURE (6)..(6): X is N or Q for amidated amino acids
  MISC_FEATURE (7)..(7): X is F, W or Y for aromatic amino acids
  MISC_FEATURE (8)..(8): X is K, R or H for basic amino acids
  MISC_FEATURE (9)..(9): X is I, L or V
  MISC_FEATURE (10)..(10): X is K, R or H for basic amino acids
  MISC_FEATURE (11)..(11): X is A and G
  MISC_FEATURE (12)..(12): X is K, R or H for basic amino acids
  MISC_FEATURE (13)..(13): X is I, L or V
  MISC_FEATURE (14)..(14): X is K, R or H for basic amino acids
  MISC_FEATURE (15)..(15): X is A and G
  MISC_FEATURE (16)..(16): X is D and E for acidic amino acids
XXXXXXXXXXXXXXXX

SEQ ID NO: 659 - protein, 17 aa, Artificial
  Completely synthesized peptide construct
  MISC_FEATURE (1)..(1): X is acetyl or propionyl group, D glycine or D alanine, cyclohexylalanine at amino terminus
  MISC_FEATURE (2)..(2): X is I, L or V
  MISC_FEATURE (3)..(3): X is F or P
  MISC_FEATURE (4)..(4): X is I, L or V
  MISC_FEATURE (5)..(5): X is C or S
  MISC_FEATURE (6)..(6): X is I, L or V
  MISC_FEATURE (7)..(7): X is N or Q for amidated amino acids
  MISC_FEATURE (8)..(8): X is F, W or Y for aromatic amino acids
  MISC_FEATURE (9)..(9): X is K, R or H for basic amino acids
  MISC_FEATURE (10)..(10): X is I, L or V
  MISC_FEATURE (11)..(11): X is K, R or H for basic amino acids
  MISC_FEATURE (12)..(12): X is A and G
  MISC_FEATURE (13)..(13): X is K, R or H for basic amino acids
  MISC_FEATURE (14)..(14): X is I, L or V
  MISC_FEATURE (15)..(15): X is K, R or H for basic amino acids
  MISC_FEATURE (16)..(16): X is A and G
  MISC_FEATURE (17)..(17): X is D and E for acidic amino acids
XXXXXXXXXXXXXXXXX

SEQ ID NO: 660 - protein, 21 aa, Artificial
  Completely synthesized peptide construct
MEVGWYRPPFSRVVHLYRNGK

SEQ ID NO: 661 - protein, 21 aa, Artificial
  Completely synthesized peptide construct
  MISC_FEATURE (1)..(1): X is M or Nle (Norleucine)
  MISC_FEATURE (2)..(2): X is D and E for acidic amino acids
  MISC_FEATURE (3)..(3): X is I, L or V
  MISC_FEATURE (4)..(4): X is A and G
  MISC_FEATURE (5)..(5): X is F, W or Y for aromatic amino acids
  MISC_FEATURE (6)..(6): X is F, W or Y for aromatic amino acids
  MISC_FEATURE (7)..(7): X is K, R or H for basic amino acids
  MISC_FEATURE (8)..(8): X is F or P
  MISC_FEATURE (9)..(9): X is F or P
  MISC_FEATURE (10)..(10): X is F or P
  MISC_FEATURE (11)..(11): X is T or S
  MISC_FEATURE (12)..(12): X is K, R or H for basic amino acids
  MISC_FEATURE (13)..(13): X is I, L or V
  MISC_FEATURE (14)..(14): X is I, L or V
  MISC_FEATURE (15)..(15): X is K, R or H for basic amino acids
  MISC_FEATURE (16)..(16): X is I, L or V
  MISC_FEATURE (17)..(17): X is F, W or Y for aromatic amino acids
  MISC_FEATURE (18)..(18): X is K, R or H for basic amino acids
  MISC_FEATURE (19)..(19): X is N or Q for amidated amino acids
  MISC_FEATURE (20)..(20): X is A and G
  MISC_FEATURE (21)..(21): X is K, R or H for basic amino acids
XXXXXXXXXXXXXXXXXXXXX

SEQ ID NO: 662 - protein, 20 aa, Artificial
  Completely synthesized peptide construct
  MISC_FEATURE (1)..(1): X is M or Nle (Norleucine)
  MISC_FEATURE (2)..(2): X is GabaX for X2X3 or X3X2 or X2X3 or X3X2 or X3X3 or X2X2
  MISC_FEATURE (3)..(3): X is A and G
  MISC_FEATURE (4)..(4): X is F, W or Y for aromatic amino acids
  MISC_FEATURE (5)..(5): X is F, W or Y for aromatic amino acids
  MISC_FEATURE (6)..(6): X is K, R or H for basic amino acids
  MISC_FEATURE (7)..(7): X is F or P
  MISC_FEATURE (8)..(8): X is F or P
  MISC_FEATURE (9)..(9): X is F or P
  MISC_FEATURE (10)..(10): X is T or S
  MISC_FEATURE (11)..(11): X is K, R or H for basic amino acids
  MISC_FEATURE (12)..(12): X is I, L or V
  MISC_FEATURE (13)..(13): X is I, L or V
  MISC_FEATURE (14)..(14): X is K, R or H for basic amino acids
  MISC_FEATURE (15)..(15): X is I, L or V
  MISC_FEATURE (16)..(16): X is F, W or Y for aromatic amino acids
  MISC_FEATURE (17)..(17): X is K, R or H for basic amino acids
  MISC_FEATURE (18)..(18): X is N or Q for amidated amino acids
  MISC_FEATURE (19)..(19): X is A and G
  MISC_FEATURE (20)..(20): X is K, R or H for basic amino acids
XXXXXXXXXXXXXXXXXXXX

SEQ ID NO: 663 - protein, 20 aa, Artificial
  Completely synthesized peptide construct
  MISC_FEATURE (1)..(1): X is M or Nle (Norleucine)
  MISC_FEATURE (2)..(2): X is D and E for acidic amino acids
  MISC_FEATURE (3)..(3): X is I, L or V
  MISC_FEATURE (4)..(4): X is A and G
  MISC_FEATURE (5)..(5): X is F, W or Y for aromatic amino acids
  MISC_FEATURE (6)..(6): X is F, W or Y for aromatic amino acids
  MISC_FEATURE (7)..(7): X is K, R or H for basic amino acids
  MISC_FEATURE (8)..(8): X is F or P
  MISC_FEATURE (9)..(9): X is F or P
  MISC_FEATURE (10)..(10): X is F or P
  MISC_FEATURE (11)..(11): X is T or S
  MISC_FEATURE (12)..(12): X is K, R or H for basic amino acids
  MISC_FEATURE (13)..(13): X is Gaba X for X2X3 or X3X2 or X2X3 or X3X2 or X3X3 or X2X2
  misc_feature (14)..(14): Xaa can be any naturally occurring amino acid
  MISC_FEATURE (15)..(15): X is I, L or V
  MISC_FEATURE (16)..(16): X is F, W or Y for aromatic amino acids
  MISC_FEATURE (17)..(17): X is K, R or H for basic amino acids
  MISC_FEATURE (18)..(18): X is N or Q for amidated amino acids
  MISC_FEATURE (19)..(19): X is A and G
  MISC_FEATURE (20)..(20): X is K, R or H for basic amino acids
XXXXXXXXXXXXXXXXXXXX

SEQ ID NO: 664 - protein, 19 aa, Artificial
  Completely synthesized peptide construct
  MISC_FEATURE (1)..(1): X is M or Nle (Norleucine)
  MISC_FEATURE (2)..(2): X is GabaX for X2X3 or X3X2 or X2X3 or X3X2 or X3X3 or X2X2
  MISC_FEATURE (3)..(3): X is A and G
  MISC_FEATURE (4)..(4): X is F, W or Y for aromatic amino acids
  MISC_FEATURE (5)..(5): X is F, W or Y for aromatic amino acids
  MISC_FEATURE (6)..(6): X is K, R or H for basic amino acids
  MISC_FEATURE (7)..(7): X is F or P
  MISC_FEATURE (8)..(8): X is F or P
  MISC_FEATURE (9)..(9): X is F or P
  MISC_FEATURE (10)..(10): X is T or S
  MISC_FEATURE (11)..(11): X is K, R or H for basic amino acids
  MISC_FEATURE (12)..(12): X is GabaX for X2X3 or X3X2 or X2X3 or X3X2 or X3X3 or X2X2
  MISC_FEATURE (13)..(13): X is K, R or H for basic amino acids
  MISC_FEATURE (14)..(14): X is I, L or V
  MISC_FEATURE (15)..(15): X is F, W or Y for aromatic amino acids
  MISC_FEATURE (16)..(16): X is K, R or H for basic amino acids
  MISC_FEATURE (17)..(17): X is N or Q for amidated amino acids
  MISC_FEATURE (18)..(18): X is A and G
  MISC_FEATURE (19)..(19): X is K, R or H for basic amino acids
XXXXXXXXXXXXXXXXXXX

SEQ ID NO: 665 - protein, 22 aa, Artificial
  Completely synthesized peptide construct
  MISC_FEATURE (1)..(1): X is acetyl or propionyl group, D glycine or D alanine, cyclohexylalanine at amino terminus
  MISC_FEATURE (2)..(2): X is M or Nle (Norleucine)
  MISC_FEATURE (3)..(3): X is D or E for acidic amino acids
  MISC_FEATURE (4)..(4): X is I, L or V
  MISC_FEATURE (5)..(5): X is A and G
  MISC_FEATURE (6)..(6): X is F, W or Y for aromatic amino acids
  MISC_FEATURE (7)..(7): X is F, W or Y for aromatic amino acids
  MISC_FEATURE (8)..(8): X is K, R or H for basic amino acids
  MISC_FEATURE (9)..(9): X is F or P
  MISC_FEATURE (10)..(10): X is F or P
  MISC_FEATURE (11)..(11): X is F or P
  MISC_FEATURE (12)..(12): X is T or S
  MISC_FEATURE (13)..(13): X is K, R or H for basic amino acids
  MISC_FEATURE (14)..(14): X is I, L or V
  MISC_FEATURE (15)..(15): X is I, L or V
  MISC_FEATURE (16)..(16): X is K, R or H for basic amino acids
  MISC_FEATURE (17)..(17): X is I, L or V
  MISC_FEATURE (18)..(18): X is F, W or Y for aromatic amino acids
  MISC_FEATURE (19)..(19): X is K, R or H for basic amino acids
  MISC_FEATURE (20)..(20): X is N or Q for amidated amino acids
  MISC_FEATURE (21)..(21): X is A and G
  MISC_FEATURE (22)..(22): X is K, R or H for basic amino acids
XXXXXXXXXXXXXXXXXXXXXX

SEQ ID NO: 666 - protein, 21 aa, Artificial
  Completely synthesized peptide construct
  MISC_FEATURE (1)..(1): X is acetyl or propionyl group, D glycine or D alanine, cyclohexylalanine at amino terminus
  MISC_FEATURE (2)..(2): X is M or Nle(Norleucine)
  MISC_FEATURE (3)..(3): X is GabaX for X2X3 or X3X2 or X2X3 or X3X2 or X3X3 or X2X2
  MISC_FEATURE (4)..(4): X is A and G
  MISC_FEATURE (5)..(5): X is F, W or Y for aromatic amino acids
  MISC_FEATURE (6)..(6): X is F, W or Y for aromatic amino acids
  MISC_FEATURE (7)..(7): X is K, R or H for basic amino acids
  MISC_FEATURE (8)..(8): X is F or P
  MISC_FEATURE (9)..(9): X is F or P
  MISC_FEATURE (10)..(10): X is F or P
  MISC_FEATURE (11)..(11): X is T or S
  MISC_FEATURE (12)..(12): X is K, R or H for basic amino acids
  MISC_FEATURE (13)..(13): X is I, L or V
  MISC_FEATURE (14)..(14): X is I, L or V
  MISC_FEATURE (15)..(15): X is K, R or H for basic amino acids
  MISC_FEATURE (16)..(16): X is I, L or V
  MISC_FEATURE (17)..(17): X is F, W or Y for aromatic amino acids
  MISC_FEATURE (18)..(18): X is K, R or H for basic amino acids
  MISC_FEATURE (19)..(19): X is N or Q for amidated amino acids
  MISC_FEATURE (20)..(20): X is A and G
  MISC_FEATURE (21)..(21): X is K, R or H for basic amino acids
XXXXXXXXXXXXXXXXXXXXX

SEQ ID NO: 667 - protein, 21 aa, Artificial
  Completely synthesized peptide construct
  MISC_FEATURE (1)..(1): X is acetyl or propionyl group, D glycine or D alanine, cyclohexylalanine at amino terminus
  MISC_FEATURE (2)..(2): X is M or Nle (Norleucine)
  MISC_FEATURE (3)..(3): X is D and E for acidic amino acids
  MISC_FEATURE (4)..(4): X is I, L or V
  MISC_FEATURE (5)..(5): X is A and G
  MISC_FEATURE (6)..(6): X is F, W or Y for aromatic amino acids
  MISC_FEATURE (7)..(7): X is F, W or Y for aromatic amino acids
  MISC_FEATURE (8)..(8): X is K, R or H for basic amino acids
  MISC_FEATURE (9)..(9): X is F or P
  MISC_FEATURE (10)..(10): X is F or P
  MISC_FEATURE (11)..(11): X is F or P
  MISC_FEATURE (12)..(12): X is T or S
  MISC_FEATURE (13)..(13): X is K, R or H for basic amino acids
  MISC_FEATURE (14)..(14): X is GabaX for X2X3 or X3X2 or X2X3 or X3X2 or X3X3 or X2X2
  MISC_FEATURE (15)..(15): X is K, R or H for basic amino acids
  MISC_FEATURE (16)..(16): X is I, L or V
  MISC_FEATURE (17)..(17): X is F, W or Y for aromatic amino acids
  MISC_FEATURE (18)..(18): X is K, R or H for basic amino acids
  MISC_FEATURE (19)..(19): X is N or Q for amidated amino acids
  MISC_FEATURE (20)..(20): X is A and G
  MISC_FEATURE (21)..(21): X is K, R or H for basic amino acids
XXXXXXXXXXXXXXXXXXXXX

SEQ ID NO: 668 - protein, 20 aa, Artificial
  Completely synthesized peptide construct
  MISC_FEATURE (1)..(1): X is acetyl or propionyl group, D glycine or D alanine, cyclohexylalanine at amino terminus
  MISC_FEATURE (2)..(2): X is M or Nle (Norleucine)
  MISC_FEATURE (3)..(3): X is GabaX for X2X3 or X3X2 or X2X3 or X3X2 or X3X3 or X2X2
  MISC_FEATURE (4)..(4): X is A and G
  MISC_FEATURE (5)..(5): X is F, W or Y for aromatic amino acids
  MISC_FEATURE (6)..(6): X is F, W or Y for aromatic amino acids
  MISC_FEATURE (7)..(7): X is K, R or H for basic amino acids
  MISC_FEATURE (8)..(8): X is F or P
  MISC_FEATURE (9)..(9): X is F or P
  MISC_FEATURE (10)..(10): X is F or P
  MISC_FEATURE (11)..(11): X is T or S
  MISC_FEATURE (12)..(12): X is K, R or H for basic amino acids
  MISC_FEATURE (13)..(13): X is GabaX for X2X3 or X3X2 or X2X3 or X3X2 or X3X3 or X2X2
  MISC_FEATURE (14)..(14): X is K, R or H for basic amino acids
  MISC_FEATURE (15)..(15): X is I, L or V
  MISC_FEATURE (16)..(16): X is F, W or Y for aromatic amino acids
  MISC_FEATURE (17)..(17): X is K, R or H for basic amino acids
  MISC_FEATURE (18)..(18): X is N or Q for amidated amino acids
  MISC_FEATURE (19)..(19): X is A and G
  MISC_FEATURE (20)..(20): X is K, R or H for basic amino acids
XXXXXXXXXXXXXXXXXXXX

SEQ ID NO: 669 - protein, 14 aa, Artificial
  Completely synthesized peptide construct
DGSSWEGVGVVPDV

SEQ ID NO: 670 - protein, 8 aa, Artificial
  Completely synthesized peptide construct
TSSEVATE

SEQ ID NO: 671 - protein, 8 aa, Artificial
  Completely synthesized peptide construct
  MISC_FEATURE (1)..(1): X is T or S
  MISC_FEATURE (2)..(2): X is T or S
  MISC_FEATURE (3)..(3): X is T or S
  MISC_FEATURE (4)..(4): X is D and E for acidic amino acids
  MISC_FEATURE (5)..(5): X is I, L or V
  MISC_FEATURE (6)..(6): X is A and G
  MISC_FEATURE (7)..(7): X is T or S
  MISC_FEATURE (8)..(8): X is D and E for acidic amino acids
XXXXXXXX

SEQ ID NO: 672 - protein, 7 aa, Artificial
  Completely synthesized peptide construct
  MISC_FEATURE (1)..(1): X is T or S
  MISC_FEATURE (2)..(2): X is T or S
  MISC_FEATURE (3)..(3): X is T or S
  MISC_FEATURE (4)..(4): X is GabaX for X2X3 or X3X2 or X2X3 or X3X2 or X3X3 or X2X2
  MISC_FEATURE (5)..(5): X is A and G
  MISC_FEATURE (6)..(6): X is T or S
  MISC_FEATURE (7)..(7): X is D and E for acidic amino acids
XXXXXXX

SEQ ID NO: 673 - protein, 9 aa, Artificial
  Completely synthesized peptide construct
  MISC_FEATURE (1)..(1): X is acetyl or propionyl group, D glycine or D alanine, cyclohexylalanine at amino terminus
  MISC_FEATURE (2)..(2): X is T or S
  MISC_FEATURE (3)..(3): X is T or S
  MISC_FEATURE (4)..(4): X is T or S
  MISC_FEATURE (5)..(5): X is D and E for acidic amino acids
  MISC_FEATURE (6)..(6): X is I, L or V
  MISC_FEATURE (7)..(7): X is A and G
  MISC_FEATURE (8)..(8): X is T or S
  MISC_FEATURE (9)..(9): X is D and E for acidic amino acids
XXXXXXXXX

SEQ ID NO: 674 - protein, 8 aa, Artificial
  Completely synthesized peptide construct
  MISC_FEATURE (1)..(1): X is acetyl or propionyl group, D glycine or D alanine, cyclohexylalanine at amino terminus
  MISC_FEATURE (2)..(2): X is T or S
  MISC_FEATURE (3)..(3): X is T or S
  MISC_FEATURE (4)..(4): X is T or S
  MISC_FEATURE (5)..(5): X is GabaX for X2X3 or X3X2 or X2X3 or X3X2 or X3X3 or X2X2
  MISC_FEATURE (6)..(6): X is A and G
  MISC_FEATURE (7)..(7): X is T or S
  MISC_FEATURE (8)..(8): X is D and E for acidic amino acids
XXXXXXXX

SEQ ID NO: 675 - protein, 8 aa, Artificial
  Completely synthesized peptide construct
TSSEAATE

SEQ ID NO: 676 - protein, 8 aa, Artificial
  Completely synthesized peptide construct
DTNLASST

SEQ ID NO: 677 - protein, 8 aa, Artificial
  Completely synthesized peptide construct
DTALASST

SEQ ID NO: 678 - protein, 8 aa, Artificial
  Completely synthesized peptide construct
  MISC_FEATURE (1)..(1): X is T or S
  MISC_FEATURE (2)..(2): X is T or S
  MISC_FEATURE (3)..(3): X is T or S
  MISC_FEATURE (4)..(4): X is D and E for acidic amino acids
  MISC_FEATURE (5)..(5): X is A and G
  MISC_FEATURE (6)..(6): X is A and G
  MISC_FEATURE (7)..(7): X is T or S
  MISC_FEATURE (8)..(8): X is D and E for acidic amino acids
XXXXXXXX

SEQ ID NO: 679 - protein, 9 aa, Artificial
  Completely synthesized peptide construct
  MISC_FEATURE (1)..(1): X is acetyl or propionyl group, D glycine or D alanine, cyclohexylalanine at amino terminus
  MISC_FEATURE (2)..(2): X is T or S
  MISC_FEATURE (3)..(3): X is T or S
  MISC_FEATURE (4)..(4): X is T or S
  MISC_FEATURE (5)..(5): X is D and E for acidic amino acids
  MISC_FEATURE (6)..(6): X is A and G
  MISC_FEATURE (7)..(7): X is A and G
  MISC_FEATURE (8)..(8): X is T or S
  MISC_FEATURE (9)..(9): X is D and E for acidic amino acids
XXXXXXXXX

SEQ ID NO: 680 - protein, 20 aa, Artificial
  Completely synthesized peptide construct
GPTHLFQPSLVLDMAKVLLD

SEQ ID NO: 681 - protein, 20 aa, Artificial
  Completely synthesized peptide construct
  MISC_FEATURE (1)..(1): X is A and G
  MISC_FEATURE (2)..(2): X is F or P
  MISC_FEATURE (3)..(3): X is T or S
  MISC_FEATURE (4)..(4): X is K, R or H for basic amino acids
  MISC_FEATURE (5)..(5): X is I, L or V
  MISC_FEATURE (6)..(6): X is F, W or Y for aromatic amino acids
  MISC_FEATURE (7)..(7): X is N or Q for amidated amino acids
  MISC_FEATURE (8)..(8): X is F or P
  MISC_FEATURE (9)..(9): X is T or S
  MISC_FEATURE (10)..(10): X is I, L or V
  MISC_FEATURE (11)..(11): X is I, L or V
  MISC_FEATURE (12)..(12): X is I, L or V
  MISC_FEATURE (13)..(13): X is D and E for acidic amino acids
  MISC_FEATURE (14)..(14): X is M or Nle (Norleucine)
  MISC_FEATURE (15)..(15): X is A and G
  MISC_FEATURE (16)..(16): X is K, R or H for basic amino acids
  MISC_FEATURE (17)..(17): X is I, L or V
  MISC_FEATURE (18)..(18): X is I, L or V
  MISC_FEATURE (19)..(19): X is I, L or V
  MISC_FEATURE (20)..(20): X is D and E for acidic amino acids
XXXXXXXXXXXXXXXXXXXX

SEQ ID NO: 682 - protein, 19 aa, Artificial
  Completely synthesized peptide construct
  MISC_FEATURE (1)..(1): X is A and G
  MISC_FEATURE (2)..(2): X is F or P
  MISC_FEATURE (3)..(3): X is T or S
  MISC_FEATURE (4)..(4): X is K, R or H for basic amino acids
  MISC_FEATURE (5)..(5): X is I, L or V
  MISC_FEATURE (6)..(6): X is F, W or Y for aromatic amino acids
  MISC_FEATURE (7)..(7): X is N or Q for amidated amino acids
  MISC_FEATURE (8)..(8): X is F or P
  MISC_FEATURE (9)..(9): X is T or S
  MISC_FEATURE (10)..(10): X is GabaX for X2X3 or X3X2 or X2X3 or X3X2 or X3X3 or X2X2
  MISC_FEATURE (11)..(11): X is I, L or V
  MISC_FEATURE (12)..(12): X is D and E for acidic amino acids
  MISC_FEATURE (13)..(13): X is M or Nle (Norleucine)
  MISC_FEATURE (14)..(14): X is A and G
  MISC_FEATURE (15)..(15): X is K, R or H for basic amino acids
  MISC_FEATURE (16)..(16): X is I, L or V
  MISC_FEATURE (17)..(17): X is I, L or V
  MISC_FEATURE (18)..(18): X is I, L or V
  MISC_FEATURE (19)..(19): X is D and E for acidic amino acids
XXXXXXXXXXXXXXXXXXX

SEQ ID NO: 683 - protein, 19 aa, Artificial
  Completely synthesized peptide construct
  MISC_FEATURE (1)..(1): X is A and G
  MISC_FEATURE (2)..(2): X is F or P
  MISC_FEATURE (3)..(3): X is T or S
  MISC_FEATURE (4)..(4): X is K, R or H for basic amino acids
  MISC_FEATURE (5)..(5): X is I, L or V
  MISC_FEATURE (6)..(6): X is F, W or Y for aromatic amino acids
  MISC_FEATURE (7)..(7): X is N or Q for amidated amino acids
  MISC_FEATURE (8)..(8): X is F or P
  MISC_FEATURE (9)..(9): X is T or S
  MISC_FEATURE (10)..(10): X is I, L or V
  MISC_FEATURE (11)..(11): X is GabaX for X2X3 or X3X2 or X2X3 or X3X2 or X3X3 or X2X2
  MISC_FEATURE (12)..(12): X is D and E for acidic amino acids
  MISC_FEATURE (13)..(13): X is M or Nle (Norleucine)
  MISC_FEATURE (14)..(14): X is A and G
  MISC_FEATURE (15)..(15): X is K, R or H for basic amino acids
  MISC_FEATURE (16)..(16): X is I, L or V
  MISC_FEATURE (17)..(17): X is I, L or V
  MISC_FEATURE (18)..(18): X is I, L or V
  MISC_FEATURE (19)..(19): X is D and E for acidic amino acids
XXXXXXXXXXXXXXXXXXX

SEQ ID NO: 684 - protein, 19 aa, Artificial
  Completely synthesized peptide construct
  MISC_FEATURE (1)..(1): X is A and G
  MISC_FEATURE (2)..(2): X is F or P
  MISC_FEATURE (3)..(3): X is T or S
  MISC_FEATURE (4)..(4): X is K, R or H for basic amino acids
  MISC_FEATURE (5)..(5): X is I, L or V
  MISC_FEATURE (6)..(6): X is F, W or Y for aromatic amino acids
  MISC_FEATURE (7)..(7): X is N or Q for amidated amino acids
  MISC_FEATURE (8)..(8): X is F or P
  MISC_FEATURE (9)..(9): X is T or S
  MISC_FEATURE (10)..(10): X is I, L or V
  MISC_FEATURE (11)..(11): X is I, L or V
  MISC_FEATURE (12)..(12): X is GabaX for X2X3 or X3X2 or X2X3 or X3X2 or X3X3 or X2X2
  MISC_FEATURE (13)..(13): X is M or Nle (Norleucine)
  MISC_FEATURE (14)..(14): X is A and G
  MISC_FEATURE (15)..(15): X is K, R or H for basic amino acids
  MISC_FEATURE (16)..(16): X is I, L or V
  MISC_FEATURE (17)..(17): X is I, L or V
  MISC_FEATURE (18)..(18): X is I, L or V
  MISC_FEATURE (19)..(19): X is D and E for basic amino acids
XXXXXXXXXXXXXXXXXXX

SEQ ID NO: 685 - protein, 19 aa, Artificial
  Completely synthesized peptide construct
  MISC_FEATURE (1)..(1): X is A and G
  MISC_FEATURE (2)..(2): X is F or P
  MISC_FEATURE (3)..(3): X is T or S
  MISC_FEATURE (4)..(4): X is K, R or H for basic amino acids
  MISC_FEATURE (5)..(5): X is I, L or V
  MISC_FEATURE (6)..(6): X is F, W or Y for aromatic amino acids
  MISC_FEATURE (7)..(7): X is N or Q for amidated amino acids
  MISC_FEATURE (8)..(8): X is F or P
  MISC_FEATURE (9)..(9): X is T or S
  MISC_FEATURE (10)..(10): X is I, L or V
  MISC_FEATURE (11)..(11): X is I, L or V
  MISC_FEATURE (12)..(12): X is I, L or V
  MISC_FEATURE (13)..(13): X is D and E for acidic amino acids
  MISC_FEATURE (14)..(14): X is M or Nle (Norleucine)
  MISC_FEATURE (15)..(15): X is A and G
  MISC_FEATURE (16)..(16): X is K, R or H for basic amino acids
  MISC_FEATURE (17)..(17): X is GabaX for X2X3 or X3X2 or X2X3 or X3X2 or X3X3 or X2X2
  MISC_FEATURE (18)..(18): X is I, L or V
  MISC_FEATURE (19)..(19): X is D and E for acidic amino acids
XXXXXXXXXXXXXXXXXXX

SEQ ID NO: 686 - protein, 19 aa, Artificial
  Completely synthesized peptide construct
  MISC_FEATURE (1)..(1): X is A and G
  MISC_FEATURE (2)..(2): X is F or P
  MISC_FEATURE (3)..(3): X is T or S
  MISC_FEATURE (4)..(4): X is K, R or H for basic amino acids
  MISC_FEATURE (5)..(5): X is I, L or V
  MISC_FEATURE (6)..(6): X is F, W or Y for aromatic amino acids
  MISC_FEATURE (7)..(7): X is N or Q for amidated amino acids
  MISC_FEATURE (8)..(8): X is F or P
  MISC_FEATURE (9)..(9): X is T or S
  MISC_FEATURE (10)..(10): X is I, L or V
  MISC_FEATURE (11)..(11): X is I, L or V
  MISC_FEATURE (12)..(12): X is I, L or V
  MISC_FEATURE (13)..(13): X is D and E for acidic amino acids
  MISC_FEATURE (14)..(14): X is M or Nle (Norleucine)
  MISC_FEATURE (15)..(15): X is A and G
  MISC_FEATURE (16)..(16): X is K, R or H for basic amino acids
  MISC_FEATURE (17)..(17): X is I, L or V
  MISC_FEATURE (18)..(18): X is GabaX for X2X3 or X3X2 or X2X3 or X3X2 or X3 X3 or X2X2
  MISC_FEATURE (19)..(19): X is D and E for acidic amino acids
XXXXXXXXXXXXXXXXXXX

SEQ ID NO: 687 - protein, 19 aa, Artificial
  Completely synthesized peptide construct
  MISC_FEATURE (1)..(1): X is A and G
  MISC_FEATURE (2)..(2): X is F or P
  MISC_FEATURE (3)..(3): X is T or S
  MISC_FEATURE (4)..(4): X is K, R or H for basic amino acids
  MISC_FEATURE (5)..(5): X is I, L or V
  MISC_FEATURE (6)..(6): X is F, W or Y for aromatic amino acids
  MISC_FEATURE (7)..(7): X is N or Q for amidated amino acids
  MISC_FEATURE (8)..(8): X is F or P
  MISC_FEATURE (9)..(9): X is T or S
  MISC_FEATURE (10)..(10): X is I, L or V
  MISC_FEATURE (11)..(11): X is I, L or V
  MISC_FEATURE (12)..(12): X is I, L or V
  MISC_FEATURE (13)..(13): X is D and E for acidic amino acids
  MISC_FEATURE (14)..(14): X is M or Nle (Norleucine)
  MISC_FEATURE (15)..(15): X is A and G
  MISC_FEATURE (16)..(16): X is K, R or H for basic amino acids
  MISC_FEATURE (17)..(17): X is I, L or V
  MISC_FEATURE (18)..(18): X is I, L or V
  MISC_FEATURE (19)..(19): X is GabaX for X2X3 or X3X2 or X2X3 or X3X2 or X3X3 or X2X2
XXXXXXXXXXXXXXXXXXX

SEQ ID NO: 688 - protein, 18 aa, Artificial
  Completely synthesized peptide construct
  MISC_FEATURE (1)..(1): X is A and G
  MISC_FEATURE (2)..(2): X is F or P
  MISC_FEATURE (3)..(3): X is T or S
  MISC_FEATURE (4)..(4): X is K, R or H for basic amino acids
  MISC_FEATURE (5)..(5): X is I, L or V
  MISC_FEATURE (6)..(6): X is F, W or Y for aromatic amino acids
  MISC_FEATURE (7)..(7): X is N or Q for amidated amino acids
  MISC_FEATURE (8)..(8): X is T or S
  MISC_FEATURE (9)..(9): X is I, L or V
  MISC_FEATURE (10)..(10): X is I, L or V
  MISC_FEATURE (11)..(11): X is I, L or V
  MISC_FEATURE (12)..(12): X is D and E for acidic amino acids
  MISC_FEATURE (13)..(13): X is D and E for acidic amino acids
  MISC_FEATURE (14)..(14): X is M or Nle (Norleucine)
  MISC_FEATURE (15)..(15): X is A and G
  MISC_FEATURE (16)..(16): X is K, R or H for basic amino acids
  MISC_FEATURE (17)..(17): X is I, L or V
  MISC_FEATURE (18)..(18): X is 5-aminopentanoic acid for replacement of 3 or 4 amino acids of X2 and X3
XXXXXXXXXXXXXXXXXX

SEQ ID NO: 689 - protein, 18 aa, Artificial
  Completely synthesized peptide construct
  MISC_FEATURE (1)..(1): X is A and G
  MISC_FEATURE (2)..(2): X is F or P
  MISC_FEATURE (3)..(3): X is T or S
  MISC_FEATURE (4)..(4): X is K, R or H for basic amino acids
  MISC_FEATURE (5)..(5): X is I, L or V
  MISC_FEATURE (6)..(6): X is F, W or Y for aromatic amino acids
  MISC_FEATURE (7)..(7): X is N or Q for amidated amino acids
  MISC_FEATURE (8)..(8): X is F or P
  MISC_FEATURE (9)..(9): X is T or S
  MISC_FEATURE (10)..(10): X is I, L or V
  MISC_FEATURE (11)..(11): X is I, L or V
  MISC_FEATURE (12)..(12): X is I, L or V
  MISC_FEATURE (13)..(13): X is D and E for acidic amino acids
  MISC_FEATURE (14)..(14): X is M or Nle (Norleucine)
  MISC_FEATURE (15)..(15): X is A and G
  MISC_FEATURE (16)..(16): X is K, R or H for basic amino acids
  MISC_FEATURE (17)..(17): X is 5-aminopentanoic acid for replacement of 3 or 4 amino acids of X2 or X3
  MISC_FEATURE (18)..(18): X is D and E for acidic amino acids
XXXXXXXXXXXXXXXXXX

SEQ ID NO: 690 - protein, 18 aa, Artificial
  Completely synthesized peptide construct
  MISC_FEATURE (1)..(1): X is A and G
  MISC_FEATURE (2)..(2): X is F or P
  MISC_FEATURE (3)..(3): X is T or S
  MISC_FEATURE (4)..(4): X is K,  R or H for basic amino acids
  MISC_FEATURE (5)..(5): X is I, L or V
  MISC_FEATURE (6)..(6): X is F, W or Y for aromatic amino acids
  MISC_FEATURE (7)..(7): X is N or Q for amidated amino acids
  MISC_FEATURE (8)..(8): X is F or P
  MISC_FEATURE (9)..(9): X is T or S
  MISC_FEATURE (10)..(10): X is 5-aminopentanoic acid for replacement of 3 or 4 amino acids of X2 and X3
  MISC_FEATURE (11)..(11): X is D and E for acidic amino acids
  MISC_FEATURE (12)..(12): X is M or Nle (Norleucine)
  MISC_FEATURE (13)..(13): X is A and G
  MISC_FEATURE (14)..(14): X is K, R or H for basic amino acids
  MISC_FEATURE (15)..(15): X is I, L or V
  MISC_FEATURE (16)..(16): X is I, L or V
  MISC_FEATURE (17)..(17): X is I, L or V
  MISC_FEATURE (18)..(18): X is D and E for acidic amino acids
XXXXXXXXXXXXXXXXXX

SEQ ID NO: 691 - protein, 17 aa, Artificial
  Completely synthesized peptide construct
  MISC_FEATURE (1)..(1): X is A and G
  MISC_FEATURE (2)..(2): X is F or P
  MISC_FEATURE (3)..(3): X is T or S
  MISC_FEATURE (4)..(4): X is K, R or H for basic amino acids
  MISC_FEATURE (5)..(5): X is I, L or V
  MISC_FEATURE (6)..(6): X is F, W or Y for aromatic amino acids
  MISC_FEATURE (7)..(7): X is N or Q for amidated amino acids
  MISC_FEATURE (8)..(8): X is F or P
  MISC_FEATURE (9)..(9): X is T or S
  MISC_FEATURE (10)..(10): X is 5-aminopentanoic acid for replacement of 3 or 4 amino acids of X2 and X3
  MISC_FEATURE (11)..(11): X is M or Nle (Norleucine)
  MISC_FEATURE (12)..(12): X is A and G
  MISC_FEATURE (13)..(13): X is K, R or H for basic amino acids
  MISC_FEATURE (14)..(14): X is I, L or V
  MISC_FEATURE (15)..(15): X is I, L or V
  MISC_FEATURE (16)..(16): X is I, L or V
  MISC_FEATURE (17)..(17): X is D and E for acidic amino acids
XXXXXXXXXXXXXXXXX

SEQ ID NO: 692 - protein, 18 aa, Artificial
  Completely synthesized peptide construct
  MISC_FEATURE (1)..(1): X is A and G
  MISC_FEATURE (2)..(2): X is F or P
  MISC_FEATURE (3)..(3): X is T or S
  MISC_FEATURE (4)..(4): X is K, R or H for basic amino acids
  MISC_FEATURE (5)..(5): X is I, L or V
  MISC_FEATURE (6)..(6): X is F, W or Y for aromatic amino acids
  MISC_FEATURE (7)..(7): X is N or Q for amidated amino acids
  MISC_FEATURE (8)..(8): X is F or P
  MISC_FEATURE (9)..(9): X is T or S
  MISC_FEATURE (10)..(10): X is I, L or V
  MISC_FEATURE (11)..(11): X is 5-aminopentanoic acid for replacement of 3 or 4 amino acids of X2 and X3
  MISC_FEATURE (12)..(12): X is M or Nle (Norleucine)
  MISC_FEATURE (13)..(13): X is A and G
  MISC_FEATURE (14)..(14): X is K, R or H for basic amino acids
  MISC_FEATURE (15)..(15): X is I, L or V
  MISC_FEATURE (16)..(16): X is I, L or V
  MISC_FEATURE (17)..(17): X is I, L or V
  MISC_FEATURE (18)..(18): X is D and E for acidic amino acids
XXXXXXXXXXXXXXXXXX

SEQ ID NO: 693 - protein, 19 aa, Artificial
  Completely synthesized peptide construct
  MISC_FEATURE (1)..(1): X is A and G
  MISC_FEATURE (2)..(2): X is F or P
  MISC_FEATURE (3)..(3): X is T or S
  MISC_FEATURE (4)..(4): X is K, R or H for basic amino acids
  MISC_FEATURE (5)..(5): X is I, L or V
  MISC_FEATURE (6)..(6): X is F, W or Y for aromatic amino acids
  MISC_FEATURE (7)..(7): X is N or Q for amidated amino acids
  MISC_FEATURE (8)..(8): X is F or P
  MISC_FEATURE (9)..(9): X is T or S
  MISC_FEATURE (10)..(10): X is GabaX for X2X3 or X3X2 or X2X3 or X3X2 or X3X3 or X2X2
  MISC_FEATURE (11)..(11): X is I, L or V
  MISC_FEATURE (12)..(12): X is D and E for acidic amino acids
  MISC_FEATURE (13)..(13): X is M or Nle (Norleucine)
  MISC_FEATURE (14)..(14): X is A and G
  MISC_FEATURE (15)..(15): X is K, R or H for basic amino acids
  MISC_FEATURE (16)..(16): X is I, L or V
  MISC_FEATURE (17)..(17): X is I, L or V
  MISC_FEATURE (18)..(18): X is I, L or V
  MISC_FEATURE (19)..(19): X is D and E for acidic amino acids
XXXXXXXXXXXXXXXXXXX

SEQ ID NO: 694 - protein, 19 aa, Artificial
  Completely synthesized peptide construct
  MISC_FEATURE (1)..(1): X is A and G
  MISC_FEATURE (2)..(2): X is F or P
  MISC_FEATURE (3)..(3): X is T or S
  MISC_FEATURE (4)..(4): X is K, R or H for basic amino acids
  MISC_FEATURE (5)..(5): X is I, L or V
  MISC_FEATURE (6)..(6): X is F, W or Y for aromatic amino acids
  MISC_FEATURE (7)..(7): X is N or Q for amidated amino acids
  MISC_FEATURE (8)..(8): X is F or P
  MISC_FEATURE (9)..(9): X is T or S
  MISC_FEATURE (10)..(10): X is I, L or V
  MISC_FEATURE (11)..(11): X is GabaX for X2X3 or X3X2 or X2X3 or X3X2 or X3X3 or X2X2
  MISC_FEATURE (12)..(12): X is D and E for acidic amino acids
  MISC_FEATURE (13)..(13): X is M or Nle (Norleucine)
  MISC_FEATURE (14)..(14): X is A and G
  MISC_FEATURE (15)..(15): X is K, R or H for basic amino acids
  MISC_FEATURE (16)..(16): X is I, L or V
  MISC_FEATURE (17)..(17): X is I, L or V
  MISC_FEATURE (18)..(18): X is I, L or V
  MISC_FEATURE (19)..(19): X is D and E for acidic amino acids
XXXXXXXXXXXXXXXXXXX

SEQ ID NO: 695 - protein, 19 aa, Artificial
  Completely synthesized peptide construct
  MISC_FEATURE (1)..(1): X is A and G
  MISC_FEATURE (2)..(2): X is F or P
  MISC_FEATURE (3)..(3): X is T or S
  MISC_FEATURE (4)..(4): X is K, R or H for basic amino acids
  MISC_FEATURE (5)..(5): X is I, L or V
  MISC_FEATURE (6)..(6): X is F, W or Y for aromatic amino acids
  MISC_FEATURE (7)..(7): X is N or Q for amidated amino acids
  MISC_FEATURE (8)..(8): X is F or P
  MISC_FEATURE (9)..(9): X is T or S
  MISC_FEATURE (10)..(10): X is I, L or V
  MISC_FEATURE (11)..(11): X is I, L or V
  MISC_FEATURE (12)..(12): X is GabaX for X2X3 or X3X2 or X2X3 or X3X2 or X3X3 or X2X2
  MISC_FEATURE (13)..(13): X is M or Nle (Norleucine)
  MISC_FEATURE (14)..(14): X is A and G
  MISC_FEATURE (15)..(15): X is K, R or H for basic amino acids
  MISC_FEATURE (16)..(16): X is I, L or V
  MISC_FEATURE (17)..(17): X is I, L or V
  MISC_FEATURE (18)..(18): X is I, L or V
  MISC_FEATURE (19)..(19): X is D and E for acidic amino acids
XXXXXXXXXXXXXXXXXXX

SEQ ID NO: 696 - protein, 19 aa, Artificial
  Completely synthesized peptide construct
  MISC_FEATURE (1)..(1): X is A and G
  MISC_FEATURE (2)..(2): X is F or P
  MISC_FEATURE (3)..(3): X is T or S
  MISC_FEATURE (4)..(4): X is K, R or H for basic amino acids
  MISC_FEATURE (5)..(5): X is I, L or V
  MISC_FEATURE (6)..(6): X is F, W or Y for aromatic amino acids
  MISC_FEATURE (7)..(7): X is N or Q for amidated amino acids
  MISC_FEATURE (8)..(8): X is F or P
  MISC_FEATURE (9)..(9): X is T or S
  MISC_FEATURE (10)..(10): X is I, L or V
  MISC_FEATURE (11)..(11): X is I, L or V
  MISC_FEATURE (12)..(12): X is I, L or V
  MISC_FEATURE (13)..(13): X is D and E for acidic amino acids
  MISC_FEATURE (14)..(14): X is M or Nle (Norleucine)
  MISC_FEATURE (15)..(15): X is A and G
  MISC_FEATURE (16)..(16): X is K, R or H for basic amino acids
  MISC_FEATURE (17)..(17): X is GabaX for X2X3 or X3X2 or X2X3 or X3X2 or X3X3 or X2X2
  MISC_FEATURE (18)..(18): X is I, L or V
  MISC_FEATURE (19)..(19): X is D and E for acidic amino acids
XXXXXXXXXXXXXXXXXXX

SEQ ID NO: 697 - protein, 19 aa, Artificial
  Completely synthesized peptide construct
  MISC_FEATURE (1)..(1): X is A and G
  MISC_FEATURE (2)..(2): X is F or P
  MISC_FEATURE (3)..(3): X is T or S
  MISC_FEATURE (4)..(4): X is K, R or H for basic amino acids
  MISC_FEATURE (5)..(5): X is I, L or V
  MISC_FEATURE (6)..(6): X is F, W or Y for aromatic amino acids
  MISC_FEATURE (7)..(7): X is N or Q for amidated amino acids
  MISC_FEATURE (8)..(8): X is F or P
  MISC_FEATURE (9)..(9): X is T or S
  MISC_FEATURE (10)..(10): X is I, L or V
  MISC_FEATURE (11)..(11): X is I, L or V
  MISC_FEATURE (12)..(12): X is I, L or V
  MISC_FEATURE (13)..(13): X is D and E for acidic amino acids
  MISC_FEATURE (14)..(14): X is M or Nle (Norleucine)
  MISC_FEATURE (15)..(15): X is A and G
  MISC_FEATURE (16)..(16): X is K, R or H for basic amino acids
  MISC_FEATURE (17)..(17): X is I, L or V
  MISC_FEATURE (18)..(18): X is GabaX for X2X3 or X3X2 or X2X3 or X3X2 or X3X3 or X2X2
  MISC_FEATURE (19)..(19): X is D and E for acidic amino acids
XXXXXXXXXXXXXXXXXXX

SEQ ID NO: 698 - protein, 19 aa, Artificial
  Completely synthesized peptide construct
  MISC_FEATURE (1)..(1): X is A and G
  MISC_FEATURE (2)..(2): X is F or P
  MISC_FEATURE (3)..(3): X is T or S
  MISC_FEATURE (4)..(4): X is K, R or H for basic amino acids
  MISC_FEATURE (5)..(5): X is I, L or V
  MISC_FEATURE (6)..(6): X is F, W or Y for aromatic amino acids
  MISC_FEATURE (7)..(7): X is N or Q for amidated amino acids
  MISC_FEATURE (8)..(8): X is F or P
  MISC_FEATURE (9)..(9): X is T or S
  MISC_FEATURE (10)..(10): X is I, L or V
  MISC_FEATURE (11)..(11): X is I, L or V
  MISC_FEATURE (12)..(12): X is I, L or V
  MISC_FEATURE (13)..(13): X is D and E for acidic amino acids
  MISC_FEATURE (14)..(14): X is M or Nle (Norleucine)
  MISC_FEATURE (15)..(15): X is A and G
  MISC_FEATURE (16)..(16): X is K, R or H for basic amino acids
  MISC_FEATURE (17)..(17): X is I, L or V
  MISC_FEATURE (18)..(18): X is I, L or V
  MISC_FEATURE (19)..(19): X is GabaX for X2X3 or X3X2 or X2X3 or X3X2 or X3X3 or X2X2
XXXXXXXXXXXXXXXXXXX

SEQ ID NO: 699 - protein, 20 aa, Artificial
  Completely synthesized peptide construct
  MISC_FEATURE (1)..(1): X is A and G
  MISC_FEATURE (2)..(2): X is F or P
  MISC_FEATURE (3)..(3): X is T or S
  MISC_FEATURE (4)..(4): X is K, R or H for basic amino acids
  MISC_FEATURE (5)..(5): X is I, L or V
  MISC_FEATURE (6)..(6): X is F, W or Y for aromatic amino acids
  MISC_FEATURE (7)..(7): X is N or Q for amidated amino acids
  MISC_FEATURE (8)..(8): X is F or P
  MISC_FEATURE (9)..(9): X is T or S
  MISC_FEATURE (10)..(10): X is I, L or V
  MISC_FEATURE (11)..(11): X is I, L or V
  MISC_FEATURE (12)..(12): X is I, L or V
  MISC_FEATURE (13)..(13): X is D and E for acidic amino acids
  MISC_FEATURE (14)..(14): X is M or Nle (Norleucine)
  MISC_FEATURE (15)..(15): X is A and G
  MISC_FEATURE (16)..(16): X is K, R or H for basic amino acids
  MISC_FEATURE (17)..(17): X is I, L or V
  MISC_FEATURE (18)..(18): X is I, L or V
  MISC_FEATURE (19)..(19): X is I, L or V
  MISC_FEATURE (20)..(20): X is D and E for acidic amino acids
XXXXXXXXXXXXXXXXXXXX

SEQ ID NO: 700 - protein, 19 aa, Artificial
  Completely synthesized peptide construct
  MISC_FEATURE (1)..(1): X is A and G
  MISC_FEATURE (2)..(2): X is F or P
  MISC_FEATURE (3)..(3): X is T or S
  MISC_FEATURE (4)..(4): X is K, R or H for basic amino acids
  MISC_FEATURE (5)..(5): X is I, L or V
  MISC_FEATURE (6)..(6): X is F, W or Y for aromatic amino acids
  MISC_FEATURE (7)..(7): X is N or Q for amidated amino acids
  MISC_FEATURE (8)..(8): X is F or P
  MISC_FEATURE (9)..(9): X is T or S
  MISC_FEATURE (10)..(10): X is GabaX for X2X3 or X3X2 or X2X3 or X3X2 or X3X3 or X2X2
  MISC_FEATURE (11)..(11): X is I, L or V
  MISC_FEATURE (12)..(12): X is D and E for acidic amino acids
  MISC_FEATURE (13)..(13): X is M or Nle (Norleucine)
  MISC_FEATURE (14)..(14): X is A and G
  MISC_FEATURE (15)..(15): X is K, R or H for basic amino acids
  MISC_FEATURE (16)..(16): X is I, L or V
  MISC_FEATURE (17)..(17): X is I, L or V
  MISC_FEATURE (18)..(18): X is I, L or V
  MISC_FEATURE (19)..(19): X is D and E for acidic amino acids
XXXXXXXXXXXXXXXXXXX

SEQ ID NO: 701 - protein, 19 aa, Artificial
  Completely synthesized peptide construct
  MISC_FEATURE (1)..(1): X is A and G
  MISC_FEATURE (2)..(2): X is F or P
  MISC_FEATURE (3)..(3): X is T or S
  MISC_FEATURE (4)..(4): X is K, R or H for basic amino acids
  MISC_FEATURE (5)..(5): X is I, L or V
  MISC_FEATURE (6)..(6): X is F, W or Y for aromatic amino acids
  MISC_FEATURE (7)..(7): X is N or Q for amidated amino acids
  MISC_FEATURE (8)..(8): X is F or P
  MISC_FEATURE (9)..(9): X is T or S
  MISC_FEATURE (10)..(10): X is I, L or V
  MISC_FEATURE (11)..(11): X is GabaX for X2X3 or X3X2 or X2X3 or X3X2 or X3X3 or X2X2
  MISC_FEATURE (12)..(12): X is D and E for acidic amino acids
  MISC_FEATURE (13)..(13): X is M or Nle (Norleucine)
  MISC_FEATURE (14)..(14): X is A and G
  MISC_FEATURE (15)..(15): X is K, R or H for basic amino acids
  MISC_FEATURE (16)..(16): X is I, L or V
  MISC_FEATURE (17)..(17): X is I, L or V
  MISC_FEATURE (18)..(18): X is I, L or V
  MISC_FEATURE (19)..(19): X is D and E for acidic amino acids
XXXXXXXXXXXXXXXXXXX

SEQ ID NO: 702 - protein, 19 aa, Artificial
  Completely synthesized peptide construct
  MISC_FEATURE (1)..(1): X is A and G
  MISC_FEATURE (2)..(2): X is F or P
  MISC_FEATURE (3)..(3): X is T or S
  MISC_FEATURE (4)..(4): X is K, R or H for basic amino acids
  MISC_FEATURE (5)..(5): X is I, L or V
  MISC_FEATURE (6)..(6): X is F, W or Y for aromatic amino acids
  MISC_FEATURE (7)..(7): X is N or Q for amidated amino acids
  MISC_FEATURE (8)..(8): X is F or P
  MISC_FEATURE (9)..(9): X is T or S
  MISC_FEATURE (10)..(10): X is I, L or V
  MISC_FEATURE (11)..(11): X is I, L or V
  MISC_FEATURE (12)..(12): X is GabaX for X2X3 or X3X2 or X2X3 or X3X2 or X3X3 or X2X2
  MISC_FEATURE (13)..(13): X is M or Nle (Norleucine)
  MISC_FEATURE (14)..(14): X is A and G
  MISC_FEATURE (15)..(15): X is A and G
  MISC_FEATURE (16)..(16): X is I, L or V
  MISC_FEATURE (17)..(17): X is I, L or V
  MISC_FEATURE (18)..(18): X is I, L or V
  MISC_FEATURE (19)..(19): X is D and E for acidic amino acids
XXXXXXXXXXXXXXXXXXX

SEQ ID NO: 703 - protein, 19 aa, Artificial
  Completely synthesized peptide construct
  MISC_FEATURE (1)..(1): X is F or P
  MISC_FEATURE (1)..(1): X is A and G
  MISC_FEATURE (2)..(2): X is F or P
  MISC_FEATURE (3)..(3): X is T or S
  MISC_FEATURE (4)..(4): X is K, R or H for basic amino acids
  MISC_FEATURE (5)..(5): X is I, L or V
  MISC_FEATURE (6)..(6): X is F, W or Y for aromatic amino acids
  MISC_FEATURE (7)..(7): X is N or Q for amidated amino acids
  MISC_FEATURE (8)..(8): X is F or P
  MISC_FEATURE (9)..(9): X is T or S
  MISC_FEATURE (10)..(10): X is I, L or V
  MISC_FEATURE (11)..(11): X is I, L or V
  MISC_FEATURE (12)..(12): X is I, L or V
  MISC_FEATURE (13)..(13): X is D and E for acidic amino acids
  MISC_FEATURE (14)..(14): X is M or Nle (Norleucine)
  MISC_FEATURE (15)..(15): X is A and G
  MISC_FEATURE (16)..(16): X is K, R or H for basic amino acids
  MISC_FEATURE (17)..(17): X is GabaX for X2X3 or X3X2 or X2X3 or X3X2 or X3X3 or X2X2
  MISC_FEATURE (18)..(18): X is I, L or V
  MISC_FEATURE (19)..(19): X is D and E for acidic amino acids
XXXXXXXXXXXXXXXXXXX

SEQ ID NO: 704 - protein, 19 aa, Artificial
  Completely synthesized peptide construct
  MISC_FEATURE (1)..(1): X is A and G
  MISC_FEATURE (2)..(2): X is F or P
  MISC_FEATURE (3)..(3): X is T or S
  MISC_FEATURE (4)..(4): X is K, R or H for basic amino acids
  MISC_FEATURE (5)..(5): X is I, L or V
  MISC_FEATURE (6)..(6): X is F, W or Y for aromatic amino acids
  MISC_FEATURE (7)..(7): X is N or Q for amidated amino acids
  MISC_FEATURE (8)..(8): X is F or P
  MISC_FEATURE (9)..(9): X is T or S
  MISC_FEATURE (10)..(10): X is I, L or V
  MISC_FEATURE (11)..(11): X is I, L or V
  MISC_FEATURE (12)..(12): X is I, L or V
  MISC_FEATURE (13)..(13): X is D and E for acidic amino acids
  MISC_FEATURE (14)..(14): X is M or Nle (Norleucine)
  MISC_FEATURE (15)..(15): X is A and G
  MISC_FEATURE (16)..(16): X is K, R or H for basic amino acids
  MISC_FEATURE (17)..(17): X is I, L or V
  MISC_FEATURE (18)..(18): X is GabaX for X2X3 or X3X2 or X2X3 or X3X2 or X3X3 or X2X2
  MISC_FEATURE (19)..(19): X is D and E for acidic amino acids
XXXXXXXXXXXXXXXXXXX

SEQ ID NO: 705 - protein, 19 aa, Artificial
  Completely synthesized peptide construct
  MISC_FEATURE (1)..(1): X is A and G
  MISC_FEATURE (2)..(2): X is F or P
  MISC_FEATURE (3)..(3): X is T or S
  MISC_FEATURE (4)..(4): X is K, R or H for basic amino acids
  MISC_FEATURE (5)..(5): X is I, L or V
  MISC_FEATURE (6)..(6): X is F, W or Y for aromatic amino acids
  MISC_FEATURE (7)..(7): X is N or Q for amidated amino acids
  MISC_FEATURE (8)..(8): X is F or P
  MISC_FEATURE (9)..(9): X is T or S
  MISC_FEATURE (10)..(10): X is I, L or V
  MISC_FEATURE (11)..(11): X is I, L or V
  MISC_FEATURE (12)..(12): X is I, L or V
  MISC_FEATURE (13)..(13): X is D and E for acidic amino acids
  MISC_FEATURE (14)..(14): X is M or Nle (Norleucine)
  MISC_FEATURE (15)..(15): X is A and G
  MISC_FEATURE (16)..(16): X is K, R or H for basic amino acids
  MISC_FEATURE (17)..(17): X is I, L or V
  MISC_FEATURE (18)..(18): X is I, L or V
  MISC_FEATURE (19)..(19): X is GabaX for X2X3 or X3X2 or X2X3 or X3X2 or X3X3 or X2X2
XXXXXXXXXXXXXXXXXXX

SEQ ID NO: 706 - protein, 18 aa, Artificial
  Completely synthesized peptide construct
  MISC_FEATURE (1)..(1): X is A and G
  MISC_FEATURE (2)..(2): X is F or P
  MISC_FEATURE (3)..(3): X is K, R or H for basic amino acids
  MISC_FEATURE (4)..(4): X is I, L or V
  MISC_FEATURE (5)..(5): X is F, W or Y for aromatic amino acids
  MISC_FEATURE (6)..(6): X is F, W or Y for aromatic amino acids
  MISC_FEATURE (7)..(7): X is N or Q for amidated amino acids
  MISC_FEATURE (8)..(8): X is F or P
  MISC_FEATURE (9)..(9): X is T or S
  MISC_FEATURE (10)..(10): X is I, L or V
  MISC_FEATURE (11)..(11): X is I, L or V
  MISC_FEATURE (12)..(12): X is I, L or V
  MISC_FEATURE (13)..(13): X is D and E for acidic amino acids
  MISC_FEATURE (14)..(14): X is M or Nle (Norleucine)
  MISC_FEATURE (15)..(15): X is A and G
  MISC_FEATURE (16)..(16): X is K, R or H for basic amino acids
  MISC_FEATURE (17)..(17): X is I, L or V
  MISC_FEATURE (18)..(18): X is 5-aminopentanoic acid for replacement of 3 or 4 amino acids of X2 or X3
XXXXXXXXXXXXXXXXXX

SEQ ID NO: 707 - protein, 18 aa, Artificial
  Completely synthesized peptide construct
  MISC_FEATURE (1)..(1): X is A and G
  MISC_FEATURE (2)..(2): X is F or P
  MISC_FEATURE (3)..(3): X is T or S
  MISC_FEATURE (4)..(4): X is K, R or H for basic amino acids
  MISC_FEATURE (5)..(5): X is I, L or V
  MISC_FEATURE (6)..(6): X is F, W or Y for aromatic amino acids
  MISC_FEATURE (7)..(7): X is N or Q for amidated amino acids
  MISC_FEATURE (8)..(8): X is F or P
  MISC_FEATURE (9)..(9): X is T or S
  MISC_FEATURE (10)..(10): X is I, L or V
  MISC_FEATURE (11)..(11): X is I, L or V
  MISC_FEATURE (12)..(12): X is I, L or V
  MISC_FEATURE (13)..(13): X is D and E for acidic amino acids
  MISC_FEATURE (14)..(14): X is M or Nle (Norleucine)
  MISC_FEATURE (15)..(15): X is A and G
  MISC_FEATURE (16)..(16): X is K, R or H for basic amino acids
  MISC_FEATURE (17)..(17): X is 5-aminopentanoic acid for replacement of 3 or 4 amino acids of X2 or X3
  MISC_FEATURE (18)..(18): X is D and E for acidic amino acids
XXXXXXXXXXXXXXXXXX

SEQ ID NO: 708 - protein, 18 aa, Artificial
  Completely synthesized peptide construct
  MISC_FEATURE (1)..(1): X is A and G
  MISC_FEATURE (2)..(2): X is F or P
  MISC_FEATURE (3)..(3): X is T or S
  MISC_FEATURE (4)..(4): X is K, R or H for basic amino acids
  MISC_FEATURE (5)..(5): X is I, L or V
  MISC_FEATURE (6)..(6): X is F, W or Y for aromatic amino acids
  MISC_FEATURE (7)..(7): X is N or Q for amidated amino acids
  MISC_FEATURE (8)..(8): X is F or P
  MISC_FEATURE (9)..(9): X is T or S
  MISC_FEATURE (10)..(10): X is 5-aminopentanoic acid for replacement of 3 or 4 amino acids of X2 or X3
  MISC_FEATURE (11)..(11): X is D and E for acidic amino acids
  MISC_FEATURE (12)..(12): X is M or Nle (Norleucine)
  MISC_FEATURE (13)..(13): X is A and G
  MISC_FEATURE (14)..(14): X is K, R or H for basic amino acids
  MISC_FEATURE (15)..(15): X is I, L or V
  MISC_FEATURE (16)..(16): X is I, L or V
  MISC_FEATURE (17)..(17): X is I, L or V
  MISC_FEATURE (18)..(18): X is D and E for acidic amino acids
XXXXXXXXXXXXXXXXXX

SEQ ID NO: 709 - protein, 17 aa, Artificial
  Completely synthesized peptide construct
  MISC_FEATURE (1)..(1): X is A and G
  MISC_FEATURE (2)..(2): X is F or P
  MISC_FEATURE (3)..(3): X is T or S
  MISC_FEATURE (4)..(4): X is K, R or H for basic amino acids
  MISC_FEATURE (5)..(5): X is I, L or V
  MISC_FEATURE (6)..(6): X is F, W or Y for aromatic amino acids
  MISC_FEATURE (7)..(7): X is N or Q for amidated amino acids
  MISC_FEATURE (8)..(8): X is F or P
  MISC_FEATURE (9)..(9): X is T or S
  MISC_FEATURE (10)..(10): X is 5-aminopentanoic acid for replacement of 3 or 4 amino acids of X2 of X3
  MISC_FEATURE (11)..(11): X is M or Nle (Norleucine)
  MISC_FEATURE (12)..(12): X is A and G
  MISC_FEATURE (13)..(13): X is K, R or H for basic amino acids
  MISC_FEATURE (14)..(14): X is I, L or V
  MISC_FEATURE (15)..(15): X is I, L or V
  MISC_FEATURE (16)..(16): X is I, L or V
  MISC_FEATURE (17)..(17): X is D and E for acidic amino acids
XXXXXXXXXXXXXXXXX

SEQ ID NO: 710 - protein, 18 aa, Artificial
  Completely synthesized peptide construct
  MISC_FEATURE (1)..(1): X is A and G
  MISC_FEATURE (2)..(2): X is F or P
  MISC_FEATURE (3)..(3): X is T or S
  MISC_FEATURE (4)..(4): X is K, R or H for basic amino acids
  MISC_FEATURE (5)..(5): X is I, L or V
  MISC_FEATURE (6)..(6): X is F, W or Y for aromatic amino acids
  MISC_FEATURE (7)..(7): X is N or Q for amidated amino acids
  MISC_FEATURE (8)..(8): X is F or P
  MISC_FEATURE (9)..(9): X is T or S
  MISC_FEATURE (10)..(10): X is 5-aminopentanoic acid for replacement of 3 or 4 amino acids of X2 or X3
  MISC_FEATURE (11)..(11): X is M or Nle (Norleucine)
  MISC_FEATURE (12)..(12): X is A and G
  MISC_FEATURE (13)..(13): X is K, R or H for basic amino acids
  MISC_FEATURE (14)..(14): X is I, L or V
  MISC_FEATURE (15)..(15): X is I, L or V
  MISC_FEATURE (16)..(16): X is I, L or V
  MISC_FEATURE (17)..(17): X is I, L or V
  MISC_FEATURE (18)..(18): X is D and E for acidic amino acids
XXXXXXXXXXXXXXXXXX

SEQ ID NO: 711 - protein, 19 aa, Artificial
  Completely synthesized peptide construct
  MISC_FEATURE (1)..(1): X is A and G
  MISC_FEATURE (2)..(2): X is F or P
  MISC_FEATURE (3)..(3): X is T or S
  MISC_FEATURE (4)..(4): X is K, R or H for basic amino acids
  MISC_FEATURE (5)..(5): X is I, L or V
  MISC_FEATURE (6)..(6): X is F, W or Y for aromatic amino acids
  MISC_FEATURE (7)..(7): X is N or Q for amidated amino acids
  MISC_FEATURE (8)..(8): X is F or P
  MISC_FEATURE (9)..(9): X is T or S
  MISC_FEATURE (10)..(10): X is GabaX for X2X3 or X3X2 or X2X3 or X3X2 or X3X3 or X2X2
  MISC_FEATURE (11)..(11): X is I, L or V
  MISC_FEATURE (12)..(12): X is D and E for acidic amino acids
  MISC_FEATURE (13)..(13): X is M or Nle (Norleucine)
  MISC_FEATURE (14)..(14): X is A andG
  MISC_FEATURE (15)..(15): X is K, R or H for basic amino acids
  MISC_FEATURE (16)..(16): X is I, L or V
  MISC_FEATURE (17)..(17): X is I, L or V
  MISC_FEATURE (18)..(18): X is I, L or V
  MISC_FEATURE (19)..(19): X is D and E for acidic amino acids
XXXXXXXXXXXXXXXXXXX

SEQ ID NO: 712 - protein, 19 aa, Artificial
  Completely synthesized peptide construct
  MISC_FEATURE (1)..(1): X is A and G
  MISC_FEATURE (2)..(2): X is F or P
  MISC_FEATURE (3)..(3): X is T or S
  MISC_FEATURE (4)..(4): X is K, R or H for basic amino acids
  MISC_FEATURE (5)..(5): X is I, L or V
  MISC_FEATURE (6)..(6): X is F, W or Y for aromatic amino acids
  MISC_FEATURE (7)..(7): X is N or Q for amidated amino acids
  MISC_FEATURE (8)..(8): X is F or P
  MISC_FEATURE (9)..(9): X is T or S
  MISC_FEATURE (10)..(10): X is I, L or V
  MISC_FEATURE (11)..(11): X is GabaX for X2X3 or X3X2 or X2X3 or X3X2 or X3X3 or X2X2
  MISC_FEATURE (12)..(12): X is D and E for acidic amino acids
  MISC_FEATURE (13)..(13): X is M or Nle (Norleucine)
  MISC_FEATURE (14)..(14): X is A and G
  MISC_FEATURE (15)..(15): X is K, R or H for basic amino acids
  MISC_FEATURE (16)..(16): X is I, L or V
  MISC_FEATURE (17)..(17): X is I, L or V
  MISC_FEATURE (18)..(18): X is I, L or V
  MISC_FEATURE (19)..(19): X is D and E for acidic amino acids
XXXXXXXXXXXXXXXXXXX

SEQ ID NO: 713 - protein, 19 aa, Artificial
  Completely synthesized peptide construct
  MISC_FEATURE (1)..(1): X is A and G
  MISC_FEATURE (2)..(2): X is F or P
  MISC_FEATURE (3)..(3): X is T or S
  MISC_FEATURE (4)..(4): X is K, R or H for basic amino acids
  MISC_FEATURE (5)..(5): X is I, L or V
  MISC_FEATURE (6)..(6): X is F, W or Y for aromatic amino acids
  MISC_FEATURE (7)..(7): X is N or Q for amidated amino acids
  MISC_FEATURE (8)..(8): X is F or P
  MISC_FEATURE (9)..(9): X is T or S
  MISC_FEATURE (10)..(10): X is I, L or V
  MISC_FEATURE (11)..(11): X is I, L or V
  MISC_FEATURE (12)..(12): X is GabaX for X2X3 or X3X2 or X2X3 or X3X2 or X3X3 or X2X2
  MISC_FEATURE (13)..(13): X is M or Nle (Norleucine)
  MISC_FEATURE (14)..(14): X is A and G
  MISC_FEATURE (15)..(15): X is K, R or H for basic amino acids
  MISC_FEATURE (16)..(16): X is I, L or V
  MISC_FEATURE (17)..(17): X is I, L or V
  MISC_FEATURE (18)..(18): X is I, L or V
  MISC_FEATURE (19)..(19): X is D and E for acidic amino acids
XXXXXXXXXXXXXXXXXXX

SEQ ID NO: 714 - protein, 17 aa, Artificial
  Completely synthesized peptide construct
  MISC_FEATURE (1)..(1): X is A and G
  MISC_FEATURE (2)..(2): X is F or P
  MISC_FEATURE (3)..(3): X is T or S
  MISC_FEATURE (4)..(4): X is K, R or H for basic amino acids
  MISC_FEATURE (5)..(5): X is I, L or V
  MISC_FEATURE (6)..(6): X is F, W or Y for aromatic amino acids
  MISC_FEATURE (7)..(7): X is N or Q for amidated amino acids
  MISC_FEATURE (8)..(8): X is F or P
  MISC_FEATURE (9)..(9): X is T or S
  MISC_FEATURE (10)..(10): X is 5-aminopentanoic acid for replacement of 3 or 4 amino acids at X2 or X3
  MISC_FEATURE (11)..(11): X is D and E for acidic amino acids
  MISC_FEATURE (12)..(12): X is M or Nle (Norleucine)
  MISC_FEATURE (13)..(13): X is A and G
  MISC_FEATURE (14)..(14): X is K, R or H for basic amino acids
  MISC_FEATURE (15)..(15): X is GabaX for X2X3 or X3X2 or X2X3 or X3X2 or X3X3 or X2X2
  MISC_FEATURE (16)..(16): X is I, L or V
  MISC_FEATURE (17)..(17): X is D and E for acidic amino acids
XXXXXXXXXXXXXXXXX

SEQ ID NO: 715 - protein, 15 aa, Artificial
  Completely synthesized peptide construct
  MISC_FEATURE (1)..(1): X is A and G
  MISC_FEATURE (2)..(2): X is F or P
  MISC_FEATURE (3)..(3): X is T or S
  MISC_FEATURE (4)..(4): X is K, R or H for basic amino acids
  MISC_FEATURE (5)..(5): X is I, L or V
  MISC_FEATURE (6)..(6): X is F, W or Y for aromatic amino acids
  MISC_FEATURE (7)..(7): X is N or Q for amidated amino acids
  MISC_FEATURE (8)..(8): X is F or P
  MISC_FEATURE (9)..(9): X is T or S
  MISC_FEATURE (10)..(10): X is 5-aminopentanoic acid for replacement of 3 or 4 amino acids of X2 or X3
  MISC_FEATURE (11)..(11): X is M or Nle (Norleucine)
  MISC_FEATURE (12)..(12): X is A and G
  MISC_FEATURE (13)..(13): X is K, R or H for basic amino acids
  MISC_FEATURE (14)..(14): X is 5-aminopentanoic acid for replacement of 3 or 4 amino acids of X2 or X3
  MISC_FEATURE (15)..(15): X is D and E for acidic amino acids
XXXXXXXXXXXXXXX

SEQ ID NO: 716 - protein, 14 aa, Artificial
  Completely synthesized peptide construct
  MISC_FEATURE (1)..(1): X is A and G
  MISC_FEATURE (2)..(2): X is F or P
  MISC_FEATURE (3)..(3): X is T or S
  MISC_FEATURE (4)..(4): X is K, R or H for basic amino acids
  MISC_FEATURE (5)..(5): X is I, L or V
  MISC_FEATURE (6)..(6): X is F, W or Y for aromatic amino acids
  MISC_FEATURE (7)..(7): X is N or Q for amidated amino acids
  MISC_FEATURE (8)..(8): X is F or P
  MISC_FEATURE (9)..(9): X is T or S
  MISC_FEATURE (10)..(10): X is 5-aminopentanoic acid for replacement of 3 or 4 amino acids of X2 and X3
  MISC_FEATURE (11)..(11): X is M or Nle (Norleucine)
  MISC_FEATURE (12)..(12): X is A and G
  MISC_FEATURE (13)..(13): X is K, R or H for basic amino acids
  MISC_FEATURE (14)..(14): X is 5-aminopentanoic aacid for replacement of 3 or 4 amino acids of X2 and X3
XXXXXXXXXXXXXX

SEQ ID NO: 717 - protein, 21 aa, Artificial
  Completely synthesized peptide construct
  MISC_FEATURE (1)..(1): X is acetyl or propionyl group, D glycine or D alanine, cyclohexylalanine at amino terminus
  MISC_FEATURE (2)..(2): X is A and G
  MISC_FEATURE (3)..(3): X is F or P
  MISC_FEATURE (4)..(4): X is T or S
  MISC_FEATURE (5)..(5): X is K, R or H for basic amino acids
  MISC_FEATURE (6)..(6): X is I, L or V
  MISC_FEATURE (7)..(7): X is F, W or Y for aromatic amino acids
  MISC_FEATURE (8)..(8): X is N or Q for amidated amino acids
  MISC_FEATURE (9)..(9): X is F or P
  MISC_FEATURE (10)..(10): X is T or S
  MISC_FEATURE (11)..(11): X is I, L or V
  MISC_FEATURE (12)..(12): X is I, L or V
  MISC_FEATURE (13)..(13): X is I, L or V
  MISC_FEATURE (14)..(14): X is A and G
  MISC_FEATURE (15)..(15): X is M or Nle (Norleucine)
  MISC_FEATURE (16)..(16): X is A and G
  MISC_FEATURE (17)..(17): X is K, R or H for basic amino acids
  MISC_FEATURE (18)..(18): X is I, L or V
  MISC_FEATURE (19)..(19): X is I, L or V
  MISC_FEATURE (20)..(20): X is I, L or V
  MISC_FEATURE (21)..(21): X is D and E for acidic amino acids
XXXXXXXXXXXXXXXXXXXXX

SEQ ID NO: 718 - protein, 20 aa, Artificial
  Completely synthesized peptide construct
  MISC_FEATURE (1)..(1): X is acetyl or propionyl group, D glycine or D alanine, cyclohexylalanine at amino terminus
  MISC_FEATURE (2)..(2): X is A and G
  MISC_FEATURE (3)..(3): X is F or P
  MISC_FEATURE (4)..(4): X is T or S
  MISC_FEATURE (5)..(5): X is K, R or H for basic amino acids
  MISC_FEATURE (6)..(6): X is I, L or V
  MISC_FEATURE (7)..(7): X is F, W or Y for aromatic amino acids
  MISC_FEATURE (8)..(8): X is N or Q for amidated amino acids
  MISC_FEATURE (9)..(9): X is F or P
  MISC_FEATURE (10)..(10): X is T or S
  MISC_FEATURE (11)..(11): X is GabaX for X2X3 or X3X2 or X2X3 or X3X2 or X3X3 or X2X2
  MISC_FEATURE (12)..(12): X is I, L or V
  MISC_FEATURE (13)..(13): X is D and E for acidic amino acids
  MISC_FEATURE (14)..(14): X is M or Nle (Norleucine)
  MISC_FEATURE (15)..(15): X is A and G
  MISC_FEATURE (16)..(16): X is K, R or H for basic amino acids
  MISC_FEATURE (17)..(17): X is I, L or V
  MISC_FEATURE (18)..(18): X is I, L or V
  MISC_FEATURE (19)..(19): X is I, L or V
  MISC_FEATURE (20)..(20): X is D and E for acidic amino acids
XXXXXXXXXXXXXXXXXXXX

SEQ ID NO: 719 - protein, 20 aa, Artificial
  Completely synthesized peptide construct
  MISC_FEATURE (1)..(1): X is acetyl or propionyl group, D glycine or D alanine, cyclhexylalanine at amino terminus
  MISC_FEATURE (2)..(2): X is A and G
  MISC_FEATURE (3)..(3): X is F or P
  MISC_FEATURE (4)..(4): X is T or S
  MISC_FEATURE (5)..(5): X is K, R or H for basic amino acids
  MISC_FEATURE (6)..(6): X is I, L or V
  MISC_FEATURE (7)..(7): X is F, W or Y for aromatic amino acids
  MISC_FEATURE (8)..(8): X is N or Q for amidated amino acids
  MISC_FEATURE (9)..(9): X is F or P
  MISC_FEATURE (10)..(10): X is T or S
  MISC_FEATURE (11)..(11): X is I, L or V
  MISC_FEATURE (12)..(12): X is GabaX for X2X3 or X3X2 or X2X3 or X3X2 or X3X3 or X2X2
  MISC_FEATURE (13)..(13): X is D and E for acidic amino acids
  MISC_FEATURE (14)..(14): X is M or Nle (Norleucine)
  MISC_FEATURE (15)..(15): X is A and G
  MISC_FEATURE (16)..(16): X is K, R or H for basic amino acids
  MISC_FEATURE (17)..(17): X is I, L or V
  MISC_FEATURE (18)..(18): X is I, L or V
  MISC_FEATURE (19)..(19): X is I, L or V
  MISC_FEATURE (20)..(20): X is D and E for acidic amino acids
XXXXXXXXXXXXXXXXXXXX

SEQ ID NO: 720 - protein, 20 aa, Artificial
  Completely synthesized peptide construct
  MISC_FEATURE (1)..(1): X is acetyl or propionyl group, D glycine or D alanine, cyclohexylalanine at amino terminus
  MISC_FEATURE (2)..(2): X is A and G
  MISC_FEATURE (3)..(3): X is F or P
  MISC_FEATURE (4)..(4): X is T or S
  MISC_FEATURE (5)..(5): X is K, R or H for basic amino acids
  MISC_FEATURE (6)..(6): X is I, L or V
  MISC_FEATURE (7)..(7): X is F, W or Y for aromatic amino acids
  MISC_FEATURE (8)..(8): X is N or Q for amidated amino acids
  MISC_FEATURE (9)..(9): X is F or P
  MISC_FEATURE (10)..(10): X is T or S
  MISC_FEATURE (11)..(11): X is I, L or V
  MISC_FEATURE (12)..(12): X is I, L or V
  MISC_FEATURE (13)..(13): X is GabaX for X2X3 or X3X2 or X2X3 or X3X2 or X3X3 or X2X2
  MISC_FEATURE (14)..(14): X is M or Nle (Norleucine)
  MISC_FEATURE (15)..(15): X is A and G
  MISC_FEATURE (16)..(16): X is K, R or H for basic amino acids
  MISC_FEATURE (17)..(17): X is I, L or V
  MISC_FEATURE (18)..(18): X is I, L or V
  MISC_FEATURE (19)..(19): X is I, L or V
  MISC_FEATURE (20)..(20): X is D and E for acidic amino acids
XXXXXXXXXXXXXXXXXXXX

SEQ ID NO: 721 - protein, 20 aa, Artificial
  Completely synthesized peptide construct
  MISC_FEATURE (1)..(1): X is acetyl or propionyl group, D glycine or D alanine, cyclohexylalanine at amino terminus
  MISC_FEATURE (2)..(2): X is A and G
  MISC_FEATURE (3)..(3): X is F or P
  MISC_FEATURE (4)..(4): X is T or S
  MISC_FEATURE (5)..(5): X is K, R or H for basic amino acids
  MISC_FEATURE (6)..(6): X is I, L or V
  MISC_FEATURE (7)..(7): X is K, R or H for basic amino acids
  MISC_FEATURE (8)..(8): X is N or Q for amidated amino acids
  MISC_FEATURE (9)..(9): X is F or P
  MISC_FEATURE (10)..(10): X is T or S
  MISC_FEATURE (11)..(11): X is I, L or V
  MISC_FEATURE (12)..(12): X is I, L or V
  MISC_FEATURE (13)..(13): X is I, L or V
  MISC_FEATURE (14)..(14): X is D and E for acidic amino acids
  MISC_FEATURE (15)..(15): X is M or Nle (Norleucine)
  MISC_FEATURE (16)..(16): X is A and G
  MISC_FEATURE (17)..(17): X is K, R or H for basic amino acids
  MISC_FEATURE (18)..(18): X is I, L or V
  MISC_FEATURE (18)..(18): X is GabaX for X2X3 or X3X2 or X2X3 or X3X2 or X3X3 or X2X2
  MISC_FEATURE (19)..(19): X is I, L or V
  MISC_FEATURE (20)..(20): X is D and E for acidic amino acids
XXXXXXXXXXXXXXXXXXXX

SEQ ID NO: 722 - protein, 20 aa, Artificial
  Completely synthesized peptide construct
  MISC_FEATURE (1)..(1): X is acetyl or propionyl group, D glycine or D alanine, cyclohexylalanine at amino terminus
  MISC_FEATURE (2)..(2): X is A and G
  MISC_FEATURE (3)..(3): X is F or P
  MISC_FEATURE (4)..(4): X is T or S
  MISC_FEATURE (5)..(5): X is K, R or H for basic amino acids
  MISC_FEATURE (6)..(6): X is I, L or V
  MISC_FEATURE (7)..(7): X is F, W or Y for aromatic amino acids
  MISC_FEATURE (8)..(8): X is N or Q for amidated amino acids
  MISC_FEATURE (9)..(9): X is F or P
  MISC_FEATURE (10)..(10): X is T or S
  MISC_FEATURE (11)..(11): X is I, L or V
  MISC_FEATURE (12)..(12): X is I, L or V
  MISC_FEATURE (13)..(13): X is I, L or V
  MISC_FEATURE (14)..(14): X is D and E for acidic amino acids
  MISC_FEATURE (15)..(15): X is M or Nle (Norleucine)
  MISC_FEATURE (16)..(16): X is A and G
  MISC_FEATURE (17)..(17): X is K, R or H for basic amino acids
  MISC_FEATURE (18)..(18): X is I, L or V
  MISC_FEATURE (19)..(19): X is GabaX for X2X3 or X3X2 or X2X3 or X3X2 or X3X3 or X2X2
  MISC_FEATURE (20)..(20): X is D and E for acidic amino acids
XXXXXXXXXXXXXXXXXXXX

SEQ ID NO: 723 - protein, 20 aa, Artificial
  Completely synthesized peptide construct
  MISC_FEATURE (1)..(1): X is acetyl or propionyl group, D glycine or D alanine, cyclohexylalanine at amino terminus
  MISC_FEATURE (2)..(2): X is A and G
  MISC_FEATURE (3)..(3): X is F or P
  MISC_FEATURE (4)..(4): X is T or S
  MISC_FEATURE (5)..(5): X is K, R or H for basic amino acids
  MISC_FEATURE (6)..(6): X is I, L or V
  MISC_FEATURE (7)..(7): X is F, W or Y for aromatic amino acids
  MISC_FEATURE (8)..(8): X is N or Q for amidated amino acids
  MISC_FEATURE (9)..(9): X is F or P
  MISC_FEATURE (10)..(10): X is T or S
  MISC_FEATURE (11)..(11): X is I, L or V
  MISC_FEATURE (12)..(12): X is I, L or V
  MISC_FEATURE (13)..(13): X is I, L or V
  MISC_FEATURE (14)..(14): X is D and E for acidic amino acids
  MISC_FEATURE (15)..(15): X is M or Nle (Norleucine)
  MISC_FEATURE (16)..(16): X is A and G
  MISC_FEATURE (17)..(17): X is K, R or H for basic amino acids
  MISC_FEATURE (18)..(18): X is I, L or V
  MISC_FEATURE (19)..(19): X is I, L or V
  MISC_FEATURE (20)..(20): X is GabaX for X2X3 or X3X2 or X2X3 or X3X2 or X3X3 or X2X2
XXXXXXXXXXXXXXXXXXXX

SEQ ID NO: 724 - protein, 19 aa, Artificial
  Completely synthesized peptide construct
  MISC_FEATURE (1)..(1): X is acetyl or propionyl group, D glycine or D alanine, cyclohexylalanine at amino terminus
  MISC_FEATURE (2)..(2): X is A and G
  MISC_FEATURE (3)..(3): X is F or P
  MISC_FEATURE (4)..(4): X is T or S
  MISC_FEATURE (5)..(5): X is K, R or H for basic amino acids
  MISC_FEATURE (6)..(6): X is I, L or V
  MISC_FEATURE (7)..(7): X is F, W or Y for aromatic amino acids
  MISC_FEATURE (8)..(8): X is N or Q for amidated amino acids
  MISC_FEATURE (9)..(9): X is F or P
  MISC_FEATURE (10)..(10): X is T or S
  MISC_FEATURE (11)..(11): X is I, L or V
  MISC_FEATURE (12)..(12): X is I, L or V
  MISC_FEATURE (13)..(13): X is I, L or V
  MISC_FEATURE (14)..(14): X is D and E for acidic amino acids
  MISC_FEATURE (15)..(15): X is M or Nle (Norleucine)
  MISC_FEATURE (16)..(16): X is A and G
  MISC_FEATURE (17)..(17): X is K, R or H for basic amino acids
  MISC_FEATURE (18)..(18): X is I, L or V
  MISC_FEATURE (19)..(19): X is 5-aminopentanoic acid for replacement of 3 or 4 amino acids of X2 and X3
XXXXXXXXXXXXXXXXXXX

SEQ ID NO: 725 - protein, 19 aa, Artificial
  Completely synthesized peptide construct
  MISC_FEATURE (1)..(1): X is acetyl or propionyl group, D glycine or D alanine, cyclohexylalanine at amino terminus
  MISC_FEATURE (2)..(2): X is A and G
  MISC_FEATURE (3)..(3): X is F or P
  MISC_FEATURE (4)..(4): X is T or S
  MISC_FEATURE (5)..(5): X is K, R or H for basic amino acids
  MISC_FEATURE (6)..(6): X is I, L or V
  MISC_FEATURE (7)..(7): X is F, W or Y for aromatic amino acids
  MISC_FEATURE (8)..(8): X is N or Q for amidated amino acids
  MISC_FEATURE (9)..(9): X is F or P
  MISC_FEATURE (10)..(10): X is T or S
  MISC_FEATURE (11)..(11): X is I, L or V
  MISC_FEATURE (12)..(12): X is I, L or V
  MISC_FEATURE (13)..(13): X is I, L or V
  MISC_FEATURE (14)..(14): X is D and E for acidic amino acids
  MISC_FEATURE (15)..(15): X is M or Nle (Norleucine)
  MISC_FEATURE (16)..(16): X is A and G
  MISC_FEATURE (17)..(17): X is K, R or H for basic amino acids
  MISC_FEATURE (18)..(18): X is 5-aminopentanoic acid for replacement of 3 or 4 amino acids of X2 and X3
  MISC_FEATURE (19)..(19): X is D and E for acidic amino acids
XXXXXXXXXXXXXXXXXXX

SEQ ID NO: 726 - protein, 19 aa, Artificial
  Completely synthesized peptide construct
  MISC_FEATURE (1)..(1): X is acetyl or propionyl group, D glycine and D alanine, cyclohexylalanine at amino terminus
  MISC_FEATURE (2)..(2): X is A and G
  MISC_FEATURE (3)..(3): X is F or P
  MISC_FEATURE (4)..(4): X is T or S
  MISC_FEATURE (5)..(5): X is K, R or H for basic amino acids
  MISC_FEATURE (6)..(6): X is I, L or V
  MISC_FEATURE (7)..(7): X is F, W or Y for aromatic amino acids
  MISC_FEATURE (8)..(8): X is N or Q for amidated amino acids
  MISC_FEATURE (9)..(9): X is F or P
  MISC_FEATURE (10)..(10): X is T or S
  MISC_FEATURE (11)..(11): X is 5-aminopentanoic acid for replacement of 3 or 4 amino acids of X2 and X3
  MISC_FEATURE (12)..(12): X is D and E for acidic amino acids
  MISC_FEATURE (13)..(13): X is M or Nle (Norleucine)
  MISC_FEATURE (14)..(14): X is A and G
  MISC_FEATURE (15)..(15): X is K, R or H for basic amino acids
  MISC_FEATURE (16)..(16): X is I, L or V
  MISC_FEATURE (17)..(17): X is I, L or V
  MISC_FEATURE (18)..(18): X is I, L or V
  MISC_FEATURE (19)..(19): X is D and E for acidic amino acids
XXXXXXXXXXXXXXXXXXX

SEQ ID NO: 727 - protein, 18 aa, Artificial
  Completely synthesized peptide construct
  MISC_FEATURE (1)..(1): X is acetyl or propionyl group, D glycine or D alanine, cyclohexylalanine at amino terminus
  MISC_FEATURE (2)..(2): X is A and G
  MISC_FEATURE (3)..(3): X is F or P
  MISC_FEATURE (4)..(4): X is T or S
  MISC_FEATURE (5)..(5): X is K, R or H for basic amino acids
  MISC_FEATURE (6)..(6): X is I, L or V
  MISC_FEATURE (7)..(7): X is F, W or Y for aromatic amino acids
  MISC_FEATURE (8)..(8): X is N or Q for amidated amino acids
  MISC_FEATURE (9)..(9): X is F or P
  MISC_FEATURE (10)..(10): X is T or S
  MISC_FEATURE (11)..(11): X is 5-aminopentanoic acid for replacement of 3 or 4 amino acids of X2 and X3
  MISC_FEATURE (12)..(12): X is M or Nle (Norleucine)
  MISC_FEATURE (13)..(13): X is A and G
  MISC_FEATURE (14)..(14): X is K, R or H for basic amino acids
  MISC_FEATURE (15)..(15): X is I, L or V
  MISC_FEATURE (16)..(16): X is I, L or V
  MISC_FEATURE (17)..(17): X is I, L or V
  MISC_FEATURE (18)..(18): X is D and E for acidic amino acids
XXXXXXXXXXXXXXXXXX

SEQ ID NO: 728 - protein, 19 aa, Artificial
  Completely synthesized peptide construct
  MISC_FEATURE (1)..(1): X is acetyl or propionyl group, D glycine or D alanine, cyclohexylalanine at amino terminus
  MISC_FEATURE (2)..(2): X is A and G
  MISC_FEATURE (3)..(3): X is F or P
  MISC_FEATURE (4)..(4): X is T or S
  MISC_FEATURE (5)..(5): X is K, R or H for basic amino acids
  MISC_FEATURE (6)..(6): X is I, L or V
  MISC_FEATURE (7)..(7): X is F, W or Y for aromatic amino acids
  MISC_FEATURE (8)..(8): X is N or Q for amidated amino acids
  MISC_FEATURE (9)..(9): X is F or P
  MISC_FEATURE (10)..(10): X is T or S
  MISC_FEATURE (11)..(11): X is I, L or V
  MISC_FEATURE (12)..(12): X is 5-aminopentanoic acid for replacement of 3 or 4 amino acids of X2 and X3
  MISC_FEATURE (13)..(13): X is M or Nle (Norleucine)
  MISC_FEATURE (14)..(14): X is A and G
  MISC_FEATURE (15)..(15): X is K, R or H for basic amino acids
  MISC_FEATURE (16)..(16): X is I, L or V
  MISC_FEATURE (17)..(17): X is I, L or V
  MISC_FEATURE (18)..(18): X is I, L or V
  MISC_FEATURE (19)..(19): X is D and E for acidic amino acids
XXXXXXXXXXXXXXXXXXX

SEQ ID NO: 729 - protein, 20 aa, Artificial
  Completely synthesized peptide construct
  MISC_FEATURE (1)..(1): X is acetyl or propionyl group, D glycine or D alanine, cyclohexylalanine at amino terminus
  MISC_FEATURE (2)..(2): X is A and G
  MISC_FEATURE (3)..(3): X is F or P
  MISC_FEATURE (4)..(4): X is T or S
  MISC_FEATURE (5)..(5): X is K, R or H for basic amino acids
  MISC_FEATURE (6)..(6): X is I, L or V
  MISC_FEATURE (7)..(7): X is F, W or Y for aromatic amino acids
  MISC_FEATURE (8)..(8): X is N or Q for amidated amino acids
  MISC_FEATURE (9)..(9): X is F or P
  MISC_FEATURE (10)..(10): X is T or S
  MISC_FEATURE (11)..(11): X is GabaX for X2X3 or X3X2 or X2X3 or X3X2 or X3X3 or X2X2
  MISC_FEATURE (12)..(12): X is I, L or V
  MISC_FEATURE (13)..(13): X is D and E for acidic amino acids
  MISC_FEATURE (14)..(14): X is M or Nle (Norleucine)
  MISC_FEATURE (15)..(15): X is A and G
  MISC_FEATURE (16)..(16): X is K, R or H for basic amino acids
  MISC_FEATURE (17)..(17): X is I, L or V
  MISC_FEATURE (18)..(18): X is I, L or V
  MISC_FEATURE (19)..(19): X is I, L or V
  MISC_FEATURE (20)..(20): X is D and E for acidic amino acids
XXXXXXXXXXXXXXXXXXXX

SEQ ID NO: 730 - protein, 20 aa, Artificial
  Completely synthesized peptide construct
  MISC_FEATURE (1)..(1): X is acetyl or propionyl group, D glycine or D alanine, cyclohexylalanine at amino terminus
  MISC_FEATURE (2)..(2): X is A and G
  MISC_FEATURE (3)..(3): X is F or P
  MISC_FEATURE (4)..(4): X is T or S
  MISC_FEATURE (5)..(5): X is K, R or H for basic amino acids
  MISC_FEATURE (6)..(6): X is I, L or V
  MISC_FEATURE (7)..(7): X is F, W or Y for aromatic amino acids
  MISC_FEATURE (8)..(8): X is N or Q for amidated amino acids
  MISC_FEATURE (9)..(9): X is F or P
  MISC_FEATURE (10)..(10): X is T or S
  MISC_FEATURE (11)..(11): X is I, L or V
  MISC_FEATURE (12)..(12): X is GabaX for X2X3 or X3X2 or X2X3 or X3X2 or X3X3 or X2X2
  MISC_FEATURE (13)..(13): X is D and E for acidic amino acids
  MISC_FEATURE (14)..(14): X is M or Nle (Norleucine)
  MISC_FEATURE (15)..(15): X is A and G
  MISC_FEATURE (16)..(16): X is K, R or H for basic amino acids
  MISC_FEATURE (17)..(17): X is I, L or V
  MISC_FEATURE (18)..(18): X is I, L or V
  MISC_FEATURE (19)..(19): X is I, L or V
  MISC_FEATURE (20)..(20): X is D and E for acidic amino acids
XXXXXXXXXXXXXXXXXXXX

SEQ ID NO: 731 - protein, 20 aa, Artificial
  Completely synthesized peptide construct
  MISC_FEATURE (1)..(1): X is acetyl or propionyl group, D glycine or D alanine, cyclohexylalanine at amino terminus
  MISC_FEATURE (2)..(2): X is A and G
  MISC_FEATURE (3)..(3): X is F or P
  MISC_FEATURE (4)..(4): X is T or S
  MISC_FEATURE (5)..(5): X is K, R or H for basic amino acids
  MISC_FEATURE (6)..(6): X is I, L or V
  MISC_FEATURE (7)..(7): X is F, W or Y for aromatic amino acids
  MISC_FEATURE (8)..(8): X is N or Q for amidated amino acids
  MISC_FEATURE (9)..(9): X is F or P
  MISC_FEATURE (10)..(10): X is T or S
  MISC_FEATURE (11)..(11): X is I, L or V
  MISC_FEATURE (12)..(12): X is I, L or V
  MISC_FEATURE (13)..(13): X is GabaX for X2X3 or X3X2 or X2X3 or X3X2 or X3X3 or X2X2
  MISC_FEATURE (14)..(14): X is M or Nle (Norleucine)
  MISC_FEATURE (15)..(15): X is A and G
  MISC_FEATURE (16)..(16): X is K, R or H for basic amino acids
  MISC_FEATURE (17)..(17): X is I, L or V
  MISC_FEATURE (18)..(18): X is I, L or V
  MISC_FEATURE (19)..(19): X is I, L or V
  MISC_FEATURE (20)..(20): X is D and E for acidic amino acids
XXXXXXXXXXXXXXXXXXXX

SEQ ID NO: 732 - protein, 20 aa, Artificial
  Completely synthesized peptide construct
  MISC_FEATURE (1)..(1): X is acetyl or propionyl group, D glycine or D alanine, cyclohexylalanine at amino terminus
  MISC_FEATURE (2)..(2): X is A and G
  MISC_FEATURE (3)..(3): X is F or P
  MISC_FEATURE (4)..(4): X is T or S
  MISC_FEATURE (5)..(5): X is K, R or H for basic amino acids
  MISC_FEATURE (6)..(6): X is I, L or V
  MISC_FEATURE (7)..(7): X is F, W or Y for aromatic amino acids
  MISC_FEATURE (8)..(8): X is N or Q for amidated amino acids
  MISC_FEATURE (9)..(9): X is F or P
  MISC_FEATURE (10)..(10): X is T or S
  MISC_FEATURE (11)..(11): X is I, L or V
  MISC_FEATURE (12)..(12): X is I, L or V
  MISC_FEATURE (13)..(13): X is I, L or V
  MISC_FEATURE (14)..(14): X is D and E for acidic amino acids
  MISC_FEATURE (15)..(15): X is M or Nle (Norleucine)
  MISC_FEATURE (16)..(16): X is A and G
  MISC_FEATURE (17)..(17): X is K, R or H for basic amino acids
  MISC_FEATURE (18)..(18): X is GabaX for X2X3 or X3X2 or X2X3 or X3X2 or X3X3 or X2X2
  MISC_FEATURE (19)..(19): X is I, L or V
  MISC_FEATURE (20)..(20): X is D and E for acidic amino acids
XXXXXXXXXXXXXXXXXXXX

SEQ ID NO: 733 - protein, 20 aa, Artificial
  Completely synthesized peptide construct
  MISC_FEATURE (1)..(1): X is acetyl or propionyl group, D glycine or D alanine, cyclohexylalanine at amino terminus
  MISC_FEATURE (2)..(2): X is A and G
  MISC_FEATURE (3)..(3): X is F or P
  MISC_FEATURE (4)..(4): X is T or S
  MISC_FEATURE (5)..(5): X is K, R or H for basic amino acids
  MISC_FEATURE (6)..(6): X is I, L or V
  MISC_FEATURE (7)..(7): X is F, W or Y for aromatic amino acids
  MISC_FEATURE (8)..(8): X is N or Q for amidated amino acids
  MISC_FEATURE (9)..(9): X is F or P
  MISC_FEATURE (10)..(10): X is T or S
  MISC_FEATURE (11)..(11): X is I, L or V
  MISC_FEATURE (12)..(12): X is I, L or V
  MISC_FEATURE (13)..(13): X is I, L or V
  MISC_FEATURE (14)..(14): X is D and E for acidic amino acids
  MISC_FEATURE (15)..(15): X is M or Nle (Norleucine)
  MISC_FEATURE (16)..(16): X is A and G
  MISC_FEATURE (17)..(17): X is K, R or H for basic amino acids
  MISC_FEATURE (18)..(18): X is I, L or V
  MISC_FEATURE (19)..(19): X is GabaX for X2X3 or X3X2 or X2X3 or X3X2 or X3X3 or X2X2
  MISC_FEATURE (20)..(20): X is D and E for acidic amino acids
XXXXXXXXXXXXXXXXXXXX

SEQ ID NO: 734 - protein, 20 aa, Artificial
  Completely synthesized peptide construct
  MISC_FEATURE (1)..(1): X is acetyl or propionyl group, D glycine or D alanine, cyclohexylalanine at amino terminus
  MISC_FEATURE (2)..(2): X is A and G
  MISC_FEATURE (3)..(3): X is F or P
  MISC_FEATURE (4)..(4): X is T or S
  MISC_FEATURE (5)..(5): X is K, R or H for basic amino acids
  MISC_FEATURE (6)..(6): X is I, L or V
  MISC_FEATURE (7)..(7): X is F, W or Y for aromatic amino acids
  MISC_FEATURE (8)..(8): X is N or Q for amidated amino acids
  MISC_FEATURE (9)..(9): X is F or P
  MISC_FEATURE (10)..(10): X is T or S
  MISC_FEATURE (11)..(11): X is I, L or V
  MISC_FEATURE (12)..(12): X is I, L or V
  MISC_FEATURE (13)..(13): X is I, L or V
  MISC_FEATURE (14)..(14): X is D and E for acidic amino acids
  MISC_FEATURE (15)..(15): X is M or Nle (Norleucine)
  MISC_FEATURE (16)..(16): X is A and G
  MISC_FEATURE (17)..(17): X is K, R or H for basic amino acids
  MISC_FEATURE (18)..(18): X is I, L or V
  MISC_FEATURE (19)..(19): X is I, L or V
  MISC_FEATURE (20)..(20): X is GabaX for X2X3 or X3X2 or X2X3 or X3X2 or X3X3 or X2X2
XXXXXXXXXXXXXXXXXXXX

SEQ ID NO: 735 - protein, 21 aa, Artificial
  Completely synthesized peptide construct
  MISC_FEATURE (1)..(1): X is acetyl or propionyl group, D glycine or D alanine, cyclohexylalanine at amino terminus
  MISC_FEATURE (2)..(2): X is A and G
  MISC_FEATURE (3)..(3): X is F or P
  MISC_FEATURE (4)..(4): X is T or S
  MISC_FEATURE (5)..(5): X is K, R or H for basic amino acids
  MISC_FEATURE (6)..(6): X is I, L or V
  MISC_FEATURE (7)..(7): X is F, W or Y for aromatic amino acids
  MISC_FEATURE (8)..(8): X is N or Q for amidated amino acids
  MISC_FEATURE (9)..(9): X is F or P
  MISC_FEATURE (10)..(10): X is T or S
  MISC_FEATURE (11)..(11): X is I, L or V
  MISC_FEATURE (12)..(12): X is I, L or V
  MISC_FEATURE (13)..(13): X is I, L or V
  MISC_FEATURE (14)..(14): X is D and E for acidic amino acids
  MISC_FEATURE (15)..(15): X is M or Nle (Norleucine)
  MISC_FEATURE (16)..(16): X is A and G
  MISC_FEATURE (17)..(17): X is K, R or H for basic amino acids
  MISC_FEATURE (18)..(18): X is I, L or V
  MISC_FEATURE (19)..(19): X is I, L or V
  MISC_FEATURE (20)..(20): X is I, L or V
  MISC_FEATURE (21)..(21): X is D and E for acidic amino acids
XXXXXXXXXXXXXXXXXXXXX

SEQ ID NO: 736 - protein, 20 aa, Artificial
  Completely synthesized peptide construct
  MISC_FEATURE (1)..(1): X is acetyl or propionyl group, D glycine or D alanine, cyclohexylalanine at amino terminus
  MISC_FEATURE (2)..(2): X is A and G
  MISC_FEATURE (3)..(3): X is F or P
  MISC_FEATURE (4)..(4): X is T or S
  MISC_FEATURE (5)..(5): X is K, R or H for basic amino acids
  MISC_FEATURE (6)..(6): X is I, L or V
  MISC_FEATURE (7)..(7): X is F, W or Y for aromatic amino acids
  MISC_FEATURE (8)..(8): X is N or Q for amidated amino acids
  MISC_FEATURE (9)..(9): X is F or P
  MISC_FEATURE (10)..(10): X is T or S
  MISC_FEATURE (11)..(11): X is GabaX for X2X3 or X3X2 or X2X3 or X3X2 or X3X3 or X2X2
  MISC_FEATURE (12)..(12): X is I, L or V
  MISC_FEATURE (13)..(13): X is D and E for acidic amino acids
  MISC_FEATURE (14)..(14): X is M or Nle (Norleucine)
  MISC_FEATURE (15)..(15): X is A and G
  MISC_FEATURE (16)..(16): X is K, R or H for basic amino acids
  MISC_FEATURE (17)..(17): X is I, L or V
  MISC_FEATURE (18)..(18): X is I, L or V
  MISC_FEATURE (19)..(19): X is I, L or V
  MISC_FEATURE (20)..(20): X is D and E for acidic amino acids
XXXXXXXXXXXXXXXXXXXX

SEQ ID NO: 737 - protein, 20 aa, Artificial
  Completely synthesized peptide construct
  MISC_FEATURE (1)..(1): X is acetyl or propionyl group, D glycine or D alanine, cyclohexylalanine at amino terminus
  MISC_FEATURE (2)..(2): X is A and G
  MISC_FEATURE (3)..(3): X is F or P
  MISC_FEATURE (4)..(4): X is T or S
  MISC_FEATURE (5)..(5): X is K, R or H for basic amino acids
  MISC_FEATURE (6)..(6): X is I, L or V
  MISC_FEATURE (7)..(7): X is F, W or Y for aromatic amino acids
  MISC_FEATURE (8)..(8): X is N or Q for amidated amino acids
  MISC_FEATURE (9)..(9): X is F or P
  MISC_FEATURE (10)..(10): X is T or S
  MISC_FEATURE (11)..(11): X is I, L or V
  MISC_FEATURE (12)..(12): X is GabaX for X2X3 or X3X2 or X2X3 or X3X2 or X3X3 or X2X2
  MISC_FEATURE (13)..(13): X is D and E for acidic amino acids
  MISC_FEATURE (14)..(14): X is M or Nle (Norleucine)
  MISC_FEATURE (15)..(15): X is A and G
  MISC_FEATURE (16)..(16): X is A and G
  MISC_FEATURE (17)..(17): X is I, L or V
  MISC_FEATURE (18)..(18): X is I, L or V
  MISC_FEATURE (19)..(19): X is I, L or V
  MISC_FEATURE (20)..(20): X is D and E for acidic amino acids
XXXXXXXXXXXXXXXXXXXX

SEQ ID NO: 738 - protein, 20 aa, Artificial
  Completely synthesized peptide construct
  MISC_FEATURE (1)..(1): X is acetyl or propionyl group, D glycine or D alanine, cyclohexylalanine at amino terminus
  MISC_FEATURE (2)..(2): X is A and G
  MISC_FEATURE (3)..(3): X is F or P
  MISC_FEATURE (4)..(4): X is T or S
  MISC_FEATURE (5)..(5): X is K, R or H for basic amino acids
  MISC_FEATURE (6)..(6): X is I, L or V
  MISC_FEATURE (7)..(7): X is F, W or Y for aromatic amino acids
  MISC_FEATURE (8)..(8): X is N or Q for amidated amino acids
  MISC_FEATURE (9)..(9): X is F or P
  MISC_FEATURE (10)..(10): X is T or S
  MISC_FEATURE (11)..(11): X is I, L or V
  MISC_FEATURE (12)..(12): X is I, L or V
  MISC_FEATURE (13)..(13): X is GabaX for X2X3 or X3X2 or X2X3 or X3X2 or X3X3 or X2X2
  MISC_FEATURE (14)..(14): X is M or Nle (Norleucine)
  MISC_FEATURE (15)..(15): X is A and G
  MISC_FEATURE (16)..(16): X is K, R or H for basic amino acids
  MISC_FEATURE (17)..(17): X is I, L or V
  MISC_FEATURE (18)..(18): X is I, L or V
  MISC_FEATURE (19)..(19): X is I, L or V
  MISC_FEATURE (20)..(20): X is D and E for acidic amino acids
XXXXXXXXXXXXXXXXXXXX

SEQ ID NO: 739 - protein, 20 aa, Artificial
  Completely synthesized peptide construct
  MISC_FEATURE (1)..(1): X is acetyl or propionyl group, D glycine or D alanine, cyclohexylalanine at amino terminus
  MISC_FEATURE (2)..(2): X is A and G
  MISC_FEATURE (3)..(3): X is F or P
  MISC_FEATURE (4)..(4): X is T or S
  MISC_FEATURE (5)..(5): X is K, R or H for basic amino acids
  MISC_FEATURE (6)..(6): X is I, L or V
  MISC_FEATURE (7)..(7): X is X is F, W or Y for aromatic amino acids
  MISC_FEATURE (8)..(8): X is N or Q for amidated amino acids
  MISC_FEATURE (9)..(9): X is F or P
  MISC_FEATURE (10)..(10): X is T or S
  MISC_FEATURE (11)..(11): X is I, L or V
  MISC_FEATURE (12)..(12): X is I, L or V
  MISC_FEATURE (13)..(13): X is I, L or V
  MISC_FEATURE (14)..(14): X is D and E for acidic amino acids
  MISC_FEATURE (15)..(15): X is M or Nle (Norleucine)
  MISC_FEATURE (16)..(16): X is A and G
  MISC_FEATURE (17)..(17): X is K, R or H for basic amino acids
  MISC_FEATURE (18)..(18): X is GabaX for X2X3 or X3X2 or X2X3 or X3X2 or X3X3 or X2X2
  MISC_FEATURE (19)..(19): X is I, L or V
  MISC_FEATURE (20)..(20): X is D and E for acidic amino acids
XXXXXXXXXXXXXXXXXXXX

SEQ ID NO: 740 - protein, 20 aa, Artificial
  Completely synthesized peptide construct
  MISC_FEATURE (1)..(1): X is acetyl or propionyl group, D glycine or D alanine, cyclohexylalanine at amino terminus
  MISC_FEATURE (2)..(2): X is A and G
  MISC_FEATURE (3)..(3): X is F or P
  MISC_FEATURE (4)..(4): X is T or S
  MISC_FEATURE (5)..(5): X is K, R or H for basic amino acids
  MISC_FEATURE (6)..(6): X is I, L or V
  MISC_FEATURE (7)..(7): X is F, W or Y for aromatic amino acids
  MISC_FEATURE (8)..(8): X is N or Q for amidated amino acids
  MISC_FEATURE (9)..(9): X is F or P
  MISC_FEATURE (10)..(10): X is T or S
  MISC_FEATURE (11)..(11): X is I, L or V
  MISC_FEATURE (12)..(12): X is I, L or V
  MISC_FEATURE (13)..(13): X is I, L or V
  MISC_FEATURE (14)..(14): X is D and E for acidic amino acids
  MISC_FEATURE (15)..(15): X is M or Nle (Norleucine)
  MISC_FEATURE (16)..(16): X is A and G
  MISC_FEATURE (17)..(17): X is K, R or H for basic amino acids
  MISC_FEATURE (18)..(18): X is I, L or V
  MISC_FEATURE (19)..(19): X is GabaX for X2X3 or X3X2 or X2X3 or X3X2 or X3X3 or X2X2
  MISC_FEATURE (20)..(20): X is D and E for acidic amino acids
XXXXXXXXXXXXXXXXXXXX

SEQ ID NO: 741 - protein, 20 aa, Artificial
  Completely synthesized peptide construct
  MISC_FEATURE (1)..(1): X is acetyl or propionyl group, D glycine or D alanine, cyclohexylalanine at amino terminus
  MISC_FEATURE (2)..(2): X is A and G
  MISC_FEATURE (3)..(3): X is F or P
  MISC_FEATURE (4)..(4): X is T or S
  MISC_FEATURE (5)..(5): X is K, R or H for basic amino acids
  MISC_FEATURE (6)..(6): X is I, L or V
  MISC_FEATURE (7)..(7): X is F, W or Y for aromatic amino acids
  MISC_FEATURE (8)..(8): X is N or Q for amidated amino acids
  MISC_FEATURE (9)..(9): X is F or P
  MISC_FEATURE (10)..(10): X is T or S
  MISC_FEATURE (11)..(11): X is I, L or V
  MISC_FEATURE (12)..(12): X is I, L or V
  MISC_FEATURE (13)..(13): X is I, L or V
  MISC_FEATURE (14)..(14): X is D and E for acidic amino acids
  MISC_FEATURE (15)..(15): X is M or Nle (Norleucine)
  MISC_FEATURE (16)..(16): X is A and G
  MISC_FEATURE (17)..(17): X is K, R or H for basic amino acids
  MISC_FEATURE (18)..(18): X is I, L or V
  MISC_FEATURE (19)..(19): X is I, L or V
  MISC_FEATURE (20)..(20): X is GabaX for X2X3 or X3X2 or X2X3 or X3X2 or X3X3 or X2X2
XXXXXXXXXXXXXXXXXXXX

SEQ ID NO: 742 - protein, 19 aa, Artificial
  Completely synthesized peptide construct
  MISC_FEATURE (1)..(1): X is acetyl or propionyl group, D glycine or D alanine, cyclohexylalanine at amino terminus
  MISC_FEATURE (2)..(2): X is A and G
  MISC_FEATURE (3)..(3): X is F or P
  MISC_FEATURE (4)..(4): X is T or S
  MISC_FEATURE (5)..(5): X is K, R or H for basic amino acids
  MISC_FEATURE (6)..(6): X is I, L or V
  MISC_FEATURE (7)..(7): X is F, W or Y for aromatic amino acids
  MISC_FEATURE (8)..(8): X is N or Q for amidated amino acids
  MISC_FEATURE (9)..(9): X is F or P
  MISC_FEATURE (10)..(10): X is T or S
  MISC_FEATURE (11)..(11): X is I, L or V
  MISC_FEATURE (12)..(12): X is I, L or V
  MISC_FEATURE (13)..(13): X is I, L or V
  MISC_FEATURE (14)..(14): X is D and E for acidic amino acids
  MISC_FEATURE (15)..(15): X is M or Nle (Norleucine)
  MISC_FEATURE (16)..(16): X is A and G
  MISC_FEATURE (17)..(17): X is K, R or H for basic amino acids
  MISC_FEATURE (18)..(18): X is I, L or V
  MISC_FEATURE (19)..(19): X is 5-aminopentanoic acid for replacement of 3 or 4 amino acids of X2 and X3
XXXXXXXXXXXXXXXXXXX

SEQ ID NO: 743 - protein, 19 aa, Artificial
  Completely synthesized peptide construct
  MISC_FEATURE (1)..(1): X is acetyl or propionyl group, D glycine or D alanine, cyclohexylalanine at amino terminus
  MISC_FEATURE (2)..(2): X is A and G
  MISC_FEATURE (3)..(3): X is F or P
  MISC_FEATURE (4)..(4): X is T or S
  MISC_FEATURE (5)..(5): X is K, R or H for basic amino acids
  MISC_FEATURE (6)..(6): X is I, L or V
  MISC_FEATURE (7)..(7): X is F, W or Y for aromatic amino acids
  MISC_FEATURE (8)..(8): X is N or Q for amidated amino acids
  MISC_FEATURE (9)..(9): X is F or P
  MISC_FEATURE (10)..(10): X is T or S
  MISC_FEATURE (11)..(11): X is I, L or V
  MISC_FEATURE (12)..(12): X is I, L or V
  MISC_FEATURE (13)..(13): X is I, L or V
  MISC_FEATURE (14)..(14): X is D and E for acidic amino acids
  MISC_FEATURE (15)..(15): X is M or Nle (Norleucine)
  MISC_FEATURE (16)..(16): X is A and G
  MISC_FEATURE (17)..(17): X is K, R or H for basic amino acids
  MISC_FEATURE (18)..(18): X is 5-aminopentanoic acid for replacement of 3 or 4 amino acids of X2 and X3
  MISC_FEATURE (19)..(19): X is D and E for acidic amino acids
XXXXXXXXXXXXXXXXXXX

SEQ ID NO: 744 - protein, 19 aa, Artificial
  Completely synthesized peptide construct
  MISC_FEATURE (1)..(1): X is acetyl or propionyl group, D glycine or D alanine, cyclohexylalanine at amino terminus
  MISC_FEATURE (2)..(2): X is A and G
  MISC_FEATURE (3)..(3): X is F or P
  MISC_FEATURE (4)..(4): X is T or S
  MISC_FEATURE (5)..(5): X is K, R or H for basic amino acids
  MISC_FEATURE (6)..(6): X is I, L or V
  MISC_FEATURE (7)..(7): X is F, W or Y for aromatic amino acids
  MISC_FEATURE (8)..(8): X is N or Q for amidated amino acids
  MISC_FEATURE (9)..(9): X is F or P
  MISC_FEATURE (10)..(10): X is T or S
  MISC_FEATURE (11)..(11): X is 5-aminopentanoic acid for replacement of 3 or 4 amino acids of X2 and X3
  MISC_FEATURE (12)..(12): X is D and E for acidic amino acids
  MISC_FEATURE (13)..(13): X is M or Nle (Norleucine)
  MISC_FEATURE (14)..(14): X is A and G
  MISC_FEATURE (15)..(15): X is K, R or H for basic amino acids
  MISC_FEATURE (16)..(16): X is I, L or V
  MISC_FEATURE (17)..(17): X is I, L or V
  MISC_FEATURE (18)..(18): X is I, L or V
  MISC_FEATURE (19)..(19): X is D and E for acidic amino acids
XXXXXXXXXXXXXXXXXXX

SEQ ID NO: 745 - protein, 18 aa, Artificial
  Completely synthesized peptide construct
  MISC_FEATURE (1)..(1): X is acetyl or propionyl group, D glycine or D alanine, cyclohexylalanine at amino terminus
  MISC_FEATURE (2)..(2): X is A and G
  MISC_FEATURE (3)..(3): X is F or P
  MISC_FEATURE (4)..(4): X is T or S
  MISC_FEATURE (5)..(5): X is K, R or H for basic amino acids
  MISC_FEATURE (6)..(6): X is I, L or V
  MISC_FEATURE (7)..(7): X is F, W or Y for aromatic amino acids
  MISC_FEATURE (8)..(8): X is N or Q for amidated amino acids
  MISC_FEATURE (9)..(9): X is F or P
  MISC_FEATURE (10)..(10): X is T or S
  MISC_FEATURE (11)..(11): X is 5-aminopentanoic acid for replacement of 3 or 4 amino acids of X2 and X3
  MISC_FEATURE (12)..(12): X is M or Nle (Norleucine)
  MISC_FEATURE (13)..(13): X is A and G
  MISC_FEATURE (14)..(14): X is K, R or H for basic amino acids
  MISC_FEATURE (15)..(15): X is I, L or V
  MISC_FEATURE (16)..(16): X is I, L or V
  MISC_FEATURE (17)..(17): X is I, L or V
  MISC_FEATURE (18)..(18): X is D and E for acidic amino acids
XXXXXXXXXXXXXXXXXX

SEQ ID NO: 746 - protein, 19 aa, Artificial
  Completely synthesized peptide construct
  MISC_FEATURE (1)..(1): X is acetyl or propionyl group, D glycine or D alanine, cyclohexylalanine at amino terminus
  MISC_FEATURE (2)..(2): X is A and G
  MISC_FEATURE (3)..(3): X is F or P
  MISC_FEATURE (4)..(4): X is T or S
  MISC_FEATURE (5)..(5): X is K, R or H for basic amino acids
  MISC_FEATURE (6)..(6): X is I, L or V
  MISC_FEATURE (7)..(7): X is F, W or Y for aromatic amino acids
  MISC_FEATURE (8)..(8): X is N or Q for amidated amino acids
  MISC_FEATURE (9)..(9): X is F or P
  MISC_FEATURE (10)..(10): X is T or S
  MISC_FEATURE (11)..(11): X is I, L or V
  MISC_FEATURE (12)..(12): X is 5-aminopentanoic acid for replacement of 3 or 4 amino acids of X2 and X3
  MISC_FEATURE (13)..(13): X is M or Nle (Norleucine)
  MISC_FEATURE (14)..(14): X is A and G
  MISC_FEATURE (15)..(15): X is K, R or H for basic amino acids
  MISC_FEATURE (16)..(16): X is I, L or V
  MISC_FEATURE (17)..(17): X is I, L or V
  MISC_FEATURE (18)..(18): X is I, L or V
  MISC_FEATURE (19)..(19): X is D and E for acidic amino acids
XXXXXXXXXXXXXXXXXXX

SEQ ID NO: 747 - protein, 20 aa, Artificial
  Completely synthesized peptide construct
  MISC_FEATURE (1)..(1): X is acetyl or propionyl group, D glycine or D alanine, cyclohexylalanine at amino terminus
  MISC_FEATURE (2)..(2): X is A and G
  MISC_FEATURE (3)..(3): X is F or P
  MISC_FEATURE (4)..(4): X is T or S
  MISC_FEATURE (5)..(5): X is K, R or H for basic amino acids
  MISC_FEATURE (6)..(6): X is I, L or V
  MISC_FEATURE (7)..(7): X is F, W or Y for aromatic amino acids
  MISC_FEATURE (8)..(8): X is N or Q for amidated amino acids
  MISC_FEATURE (9)..(9): X is F or P
  MISC_FEATURE (10)..(10): X is T or S
  MISC_FEATURE (11)..(11): X is GabaX for X2X3 or X3X2 or X2X3 or X3X2 or X3X3 or X2X2
  MISC_FEATURE (12)..(12): X is I, L or V
  MISC_FEATURE (13)..(13): X is D and E for acidic amino acids
  MISC_FEATURE (14)..(14): X is M or Nle (Norleucine)
  MISC_FEATURE (15)..(15): X is A and G
  MISC_FEATURE (16)..(16): X is K, R or H for basic amino acids
  MISC_FEATURE (17)..(17): X is I, L or V
  MISC_FEATURE (18)..(18): X is I, L or V
  MISC_FEATURE (19)..(19): X is I, L or V
  MISC_FEATURE (20)..(20): X is D and E for acidic amino acids
XXXXXXXXXXXXXXXXXXXX

SEQ ID NO: 748 - protein, 20 aa, Artificial
  Completely synthesized peptide construct
  MISC_FEATURE (1)..(1): X is acetyl or propionyl group, D glycine or D alanine, cyclohexylalanine at amino terminus
  MISC_FEATURE (2)..(2): X is A and G
  MISC_FEATURE (3)..(3): X is F or P
  MISC_FEATURE (4)..(4): X is T or S
  MISC_FEATURE (5)..(5): X is K, R or H for basic amino acids
  MISC_FEATURE (6)..(6): X is I, L or V
  MISC_FEATURE (7)..(7): X is F, W or Y for aromatic amino acids
  MISC_FEATURE (8)..(8): X is N or Q for amidated amino acids
  MISC_FEATURE (9)..(9): X is F or P
  MISC_FEATURE (10)..(10): X is T or S
  MISC_FEATURE (11)..(11): X is I, L or V
  MISC_FEATURE (12)..(12): X is GabaX for X2X3 or X3X2 or X2X3 or X3X2 or X3X3 or X2X2
  MISC_FEATURE (13)..(13): X is D and E for acidic amino acids
  MISC_FEATURE (14)..(14): X is M or Nle (Norleucine)
  MISC_FEATURE (15)..(15): X is A and G
  MISC_FEATURE (16)..(16): X is K, R or H for basic amino acids
  MISC_FEATURE (17)..(17): X is I, L or V
  MISC_FEATURE (18)..(18): X is I, L or V
  MISC_FEATURE (19)..(19): X is I, L or V
  MISC_FEATURE (20)..(20): X is D and E for acidic amino acids
XXXXXXXXXXXXXXXXXXXX

SEQ ID NO: 749 - protein, 20 aa, Artificial
  Completely synthesized peptide construct
  MISC_FEATURE (1)..(1): X is acetyl or propionyl group, D glycine or D alanine, cyclohexylalanine at amino terminus
  MISC_FEATURE (2)..(2): X is A and G
  MISC_FEATURE (3)..(3): X is F or P
  MISC_FEATURE (4)..(4): X is T or S
  MISC_FEATURE (5)..(5): X is K, R or H for basic amino acids
  MISC_FEATURE (6)..(6): X is I, L or V
  MISC_FEATURE (7)..(7): X is F, W or Y for aromatic amino acids
  MISC_FEATURE (8)..(8): X is N or Q for amidated amino acids
  MISC_FEATURE (9)..(9): X is F or P
  MISC_FEATURE (10)..(10): X is T or S
  MISC_FEATURE (11)..(11): X is I, L or V
  MISC_FEATURE (12)..(12): X is I, L or V
  MISC_FEATURE (13)..(13): X is GabaX for X2X3 or X3X2 or X2X3 or X3X2 or X3X3 or X2X2
  MISC_FEATURE (14)..(14): X is M or Nle (Norleucine)
  MISC_FEATURE (15)..(15): X is A and G
  MISC_FEATURE (16)..(16): X is K, R or H for basic amino acids
  MISC_FEATURE (17)..(17): X is I, L or V
  MISC_FEATURE (18)..(18): X is I, L or V
  MISC_FEATURE (19)..(19): X is I, L or V
  MISC_FEATURE (20)..(20): X is D and E for acidic amino acids
XXXXXXXXXXXXXXXXXXXX

SEQ ID NO: 750 - protein, 18 aa, Artificial
  Completely synthesized peptide construct
  MISC_FEATURE (1)..(1): X is acetyl or propionyl group, D glycine or D alanine, cyclohexylalanine at amino terminus
  MISC_FEATURE (2)..(2): X is A and G
  MISC_FEATURE (3)..(3): X is F or P
  MISC_FEATURE (4)..(4): X is T or S
  MISC_FEATURE (5)..(5): X is K, R or H for basic amino acids
  MISC_FEATURE (6)..(6): X is I, L or V
  MISC_FEATURE (7)..(7): X is F, W or Y for aromatic amino acids
  MISC_FEATURE (8)..(8): X is N or Q for amidated amino acids
  MISC_FEATURE (9)..(9): X is F or P
  MISC_FEATURE (10)..(10): X is T or S
  MISC_FEATURE (11)..(11): X is 5-aminopentanoic acid for replacement of 3 or 4 amino acids of X2 and X3
  MISC_FEATURE (12)..(12): X is D and E for acidic amino acids
  MISC_FEATURE (13)..(13): X is M or Nle (Norleucine)
  MISC_FEATURE (14)..(14): X is A and G
  MISC_FEATURE (15)..(15): X is K, R or H for basic amino acids
  MISC_FEATURE (16)..(16): X is GabaX for X2X3 or X3X2 or X2X3 or X3X2 or X3X3 or X2X2
  MISC_FEATURE (17)..(17): X is I, L or V
  MISC_FEATURE (18)..(18): X is D and E for acidic amino acids
XXXXXXXXXXXXXXXXXX

SEQ ID NO: 751 - protein, 16 aa, Artificial
  Completely synthesized peptide construct
  MISC_FEATURE (1)..(1): X is acetyl or propionyl group, D glycine or D alanine, cyclohexylalanine at amino terminus
  MISC_FEATURE (2)..(2): X is A and G
  MISC_FEATURE (3)..(3): X is F or P
  MISC_FEATURE (4)..(4): X is T or S
  MISC_FEATURE (5)..(5): X is K, R or H for basic amino acids
  MISC_FEATURE (6)..(6): X is I, L or V
  MISC_FEATURE (7)..(7): X is F, W or Y for aromatic amino acids
  MISC_FEATURE (8)..(8): X is N or Q for amidated amino acids
  MISC_FEATURE (9)..(9): X is F or P
  MISC_FEATURE (10)..(10): X is T or S
  MISC_FEATURE (11)..(11): X is 5-aminopentanoic acid for replacement of 3 or 4 amino acids of X2 and X3
  MISC_FEATURE (12)..(12): X is M or Nle (Norleucine)
  MISC_FEATURE (13)..(13): X is A and G
  MISC_FEATURE (14)..(14): X is K, R or H for basic amino acids
  MISC_FEATURE (15)..(15): X is 5-aminopentanoic acid for replacement of 3 or 4 amino acids of X2 and X3
  MISC_FEATURE (16)..(16): X is D and E for acidic amino acids
XXXXXXXXXXXXXXXX

SEQ ID NO: 752 - protein, 15 aa, Artificial
  Completely synthesized peptide construct
  MISC_FEATURE (1)..(1): X is acetyl or propionyl group, D glycine or D alanine, cyclohexylalanine at amino terminus
  MISC_FEATURE (2)..(2): X is A and G
  MISC_FEATURE (3)..(3): X is F or P
  MISC_FEATURE (4)..(4): X is T or S
  MISC_FEATURE (5)..(5): X is K, R or H for basic amino acids
  MISC_FEATURE (6)..(6): X is I, L or V
  MISC_FEATURE (7)..(7): X is F, W or Y for aromatic amino acids
  MISC_FEATURE (8)..(8): X is N or Q for amidated amino acids
  MISC_FEATURE (9)..(9): X is F or P
  MISC_FEATURE (10)..(10): X is T or S
  MISC_FEATURE (11)..(11): X is 5-aminopentanoic acid for replacement of 3 or 4 amino acids of X2 and X3
  MISC_FEATURE (12)..(12): X is M or Nle (Norleucine)
  MISC_FEATURE (13)..(13): X is A and G
  MISC_FEATURE (14)..(14): X is K, R or H for basic amino acids
  MISC_FEATURE (15)..(15): X is 5-aminopentanoic acid for replacement of 3 or 4 amino acids of X2 and X3
XXXXXXXXXXXXXXX

SEQ ID NO: 753 - protein, 13 aa, Artificial
  Completely synthesized peptide construct
VIVELIPSTSSAV

SEQ ID NO: 754 - protein, 18 aa, Artificial
  Completely synthesized peptide construct
DTPYLDITYHFVMQRLPL

SEQ ID NO: 755 - protein, 18 aa, Artificial
  Completely synthesized peptide construct
  MISC_FEATURE (1)..(1): X is D and E for acidic amino acids
  MISC_FEATURE (2)..(2): X is T or S
  MISC_FEATURE (3)..(3): X is F or P
  MISC_FEATURE (4)..(4): X is F, W or Y for aromatic amino acids
  MISC_FEATURE (5)..(5): X is I, L or V
  MISC_FEATURE (6)..(6): X is D and E for acidic amino acids
  MISC_FEATURE (7)..(7): X is I, L or V
  MISC_FEATURE (8)..(8): X is T or S
  MISC_FEATURE (9)..(9): X is F, W or Y for aromatic amino acids
  MISC_FEATURE (10)..(10): X is K, R or H for basic amino acids
  MISC_FEATURE (11)..(11): X is F or P
  MISC_FEATURE (12)..(12): X is I, L or V
  MISC_FEATURE (13)..(13): X is M or Nle (Norleucine)
  MISC_FEATURE (14)..(14): X is N or Q for amidated amino acids
  MISC_FEATURE (15)..(15): X is K, R or H for basic amino acids
  MISC_FEATURE (16)..(16): X is I, L or V
  MISC_FEATURE (17)..(17): X is F or P
  MISC_FEATURE (18)..(18): X is I, L or V
XXXXXXXXXXXXXXXXXX

SEQ ID NO: 756 - protein, 17 aa, Artificial
  Completely synthesized peptide construct
  MISC_FEATURE (1)..(1): X is D and E for acidic amino acids
  MISC_FEATURE (2)..(2): X is T or S
  MISC_FEATURE (3)..(3): X is F or P
  MISC_FEATURE (4)..(4): X is F, W or Y for aromatic amino acids
  MISC_FEATURE (5)..(5): X is GabaX for X2X3 or X3X2 or X2X3 or X3X2 or X3X3 or X2X2
  MISC_FEATURE (6)..(6): X is I, L or V
  MISC_FEATURE (7)..(7): X is T or S
  MISC_FEATURE (8)..(8): X is F, W or Y for aromatic amino acids
  MISC_FEATURE (9)..(9): X is K, R or H for basic amino acids
  MISC_FEATURE (10)..(10): X is F or P
  MISC_FEATURE (11)..(11): X is I, L or V
  MISC_FEATURE (12)..(12): X is M or Nle (Norleucine)
  MISC_FEATURE (13)..(13): X is N or Q for amidated amino acids
  MISC_FEATURE (14)..(14): X is K, R or H for basic amino acids
  MISC_FEATURE (15)..(15): X is I, L or V
  MISC_FEATURE (16)..(16): X is F or P
  MISC_FEATURE (17)..(17): X is I, L or V
XXXXXXXXXXXXXXXXX

SEQ ID NO: 757 - protein, 17 aa, Artificial
  Completely synthesized peptide construct
  MISC_FEATURE (1)..(1): X is D and E for acidic amino acids
  MISC_FEATURE (2)..(2): X is T or S
  MISC_FEATURE (3)..(3): X is F or P
  MISC_FEATURE (4)..(4): X is F, W or Y for aromatic amino acids
  MISC_FEATURE (5)..(5): X is I, L or V
  MISC_FEATURE (6)..(6): X is GabaX for X2X3 or X3X2 or X2X3 or X3X2 or X3X3 or X2X2
  MISC_FEATURE (7)..(7): X is T or S
  MISC_FEATURE (8)..(8): X is F, W or Y for aromatic amino acids
  MISC_FEATURE (9)..(9): X is K, R or H for basic amino acids
  MISC_FEATURE (10)..(10): X is F or P
  MISC_FEATURE (11)..(11): X is I, L or V
  MISC_FEATURE (12)..(12): X is M or Nle (Norleucine)
  MISC_FEATURE (13)..(13): X is N or Q for amidated amino acids
  MISC_FEATURE (14)..(14): X is K, R or H for basic amino acids
  MISC_FEATURE (15)..(15): X is I, L or V
  MISC_FEATURE (16)..(16): X is F or P
  MISC_FEATURE (17)..(17): X is I, L or V
XXXXXXXXXXXXXXXXX

SEQ ID NO: 758 - protein, 16 aa, Artificial
  Completely synthesized peptide construct
  MISC_FEATURE (1)..(1): X is D and E for acidic amino acids
  MISC_FEATURE (2)..(2): X is T or S
  MISC_FEATURE (3)..(3): X is F or P
  MISC_FEATURE (4)..(4): X is F, W or Y for aromatic amino acids
  MISC_FEATURE (5)..(5): X is 5-aminopentanoic acid for replacement of 3 or 4 amino acids of X2 and X3
  MISC_FEATURE (6)..(6): X is T or S
  MISC_FEATURE (7)..(7): X is F, W or Y for aromatic amino acids
  MISC_FEATURE (8)..(8): X is K, R or H for basic amino acids
  MISC_FEATURE (9)..(9): X is F or P
  MISC_FEATURE (10)..(10): X is I, L or V
  MISC_FEATURE (11)..(11): X is M or Nle (Norleucine)
  MISC_FEATURE (12)..(12): X is N or Q for amidated amino acids
  MISC_FEATURE (13)..(13): X is K, R or H for basic amino acids
  MISC_FEATURE (14)..(14): X is I, L or V
  MISC_FEATURE (15)..(15): X is F or P
  MISC_FEATURE (16)..(16): X is I, L or V
XXXXXXXXXXXXXXXX

SEQ ID NO: 759 - protein, 19 aa, Artificial
  Completely synthesized peptide construct
  MISC_FEATURE (1)..(1): X is acetyl or propionyl group, D glycine or D alanine, cyclohexylalanine at amino terminus
  MISC_FEATURE (2)..(2): X is D and E for acidic amino acids
  MISC_FEATURE (3)..(3): X is T or S
  MISC_FEATURE (4)..(4): X is F or P
  MISC_FEATURE (5)..(5): X is F, W or Y for aromatic amino acids
  MISC_FEATURE (6)..(6): X is I, L or V
  MISC_FEATURE (7)..(7): X is D and E for acidic amino acids
  MISC_FEATURE (8)..(8): X is I, L or V
  MISC_FEATURE (9)..(9): X is T or S
  MISC_FEATURE (10)..(10): X is F, W or Y for aromatic amino acids
  MISC_FEATURE (11)..(11): X is K, R or H for basic amino acids
  MISC_FEATURE (12)..(12): X is F or P
  MISC_FEATURE (13)..(13): X is I, L or V
  MISC_FEATURE (14)..(14): X is M or Nle (Norleucine)
  MISC_FEATURE (15)..(15): X is N or Q for amidated amino acids
  MISC_FEATURE (16)..(16): X is K, R or H for basic amino acids
  MISC_FEATURE (17)..(17): X is I, L or V
  MISC_FEATURE (18)..(18): X is F or P
  MISC_FEATURE (19)..(19): X is I, L or V
XXXXXXXXXXXXXXXXXXX

SEQ ID NO: 760 - protein, 18 aa, Artificial
  Completely synthesized peptide construct
  MISC_FEATURE (1)..(1): X is acetyl or propionyl group, D glycine or D alanine, cyclohexylalanine at amino terminus
  MISC_FEATURE (2)..(2): X is D and E for acidic amino acids
  MISC_FEATURE (3)..(3): X is T or S
  MISC_FEATURE (4)..(4): X is F or P
  MISC_FEATURE (5)..(5): X is F, W or Y for aromatic amino acids
  MISC_FEATURE (6)..(6): X is GabaX for X2X3 or X3X2 or X2X3 or X3X2 or X3X3 or X2X2
  MISC_FEATURE (7)..(7): X is I, L or V
  MISC_FEATURE (8)..(8): X is T or S
  MISC_FEATURE (9)..(9): X is F, W or Y for aromatic amino acids
  MISC_FEATURE (10)..(10): X is K, R or H for basic amino acids
  MISC_FEATURE (11)..(11): X is F or P
  MISC_FEATURE (12)..(12): X is I, L or V
  MISC_FEATURE (13)..(13): X is M or Nle (Norleucine)
  MISC_FEATURE (14)..(14): X is N or Q for amidated amino acids
  MISC_FEATURE (15)..(15): X is K, R or H for basic amino acids
  MISC_FEATURE (16)..(16): X is I, L or V
  MISC_FEATURE (17)..(17): X is F or P
  MISC_FEATURE (18)..(18): X is I, L or V
XXXXXXXXXXXXXXXXXX

SEQ ID NO: 761 - protein, 18 aa, Artificial
  Completely synthesized peptide construct
  MISC_FEATURE (1)..(1): X is acetyl or propionyl group, D glycine or D alanine, cyclohexylalanine at amino terminus
  MISC_FEATURE (2)..(2): X is D and E for acidic amino acids
  MISC_FEATURE (3)..(3): X is T or S
  MISC_FEATURE (4)..(4): X is F or P
  MISC_FEATURE (5)..(5): X is F, W or Y for aromatic amino acids
  MISC_FEATURE (6)..(6): X is I, L or V
  MISC_FEATURE (7)..(7): X is GabaX for X2X3 or X3X2 or X2X3 or X3X2 or X3X3 or X2X2
  MISC_FEATURE (8)..(8): X is T or S
  MISC_FEATURE (9)..(9): X is F, W or Y for aromatic amino acids
  MISC_FEATURE (10)..(10): X is K, R or H for basic amino acids
  MISC_FEATURE (11)..(11): X is F or P
  MISC_FEATURE (12)..(12): X is I, L or V
  MISC_FEATURE (13)..(13): X is M or Nle (Norleucine)
  MISC_FEATURE (14)..(14): X is N or Q for amidated amino acids
  MISC_FEATURE (15)..(15): X is K, R or H for basic amino acids
  MISC_FEATURE (16)..(16): X is I, L or V
  MISC_FEATURE (17)..(17): X is F or P
  MISC_FEATURE (18)..(18): X is I, L or V
XXXXXXXXXXXXXXXXXX

SEQ ID NO: 762 - protein, 17 aa, Artificial
  Completely synthesized peptide construct
  MISC_FEATURE (1)..(1): X is acetyl or propionyl group, D glycine or D alanine, cyclohexylalanine at amino terminus
  MISC_FEATURE (2)..(2): X is D and E for acidic amino acids
  MISC_FEATURE (3)..(3): X is T or S
  MISC_FEATURE (4)..(4): X is F or P
  MISC_FEATURE (5)..(5): X is F, W or Y for aromatic amino acids
  MISC_FEATURE (6)..(6): X is 5-aminopentanoic acid for replacement of 3 or 4 amino acids of X2 and X3
  MISC_FEATURE (7)..(7): X is T or S
  MISC_FEATURE (8)..(8): X is F, W or Y for aromatic amino acids
  MISC_FEATURE (9)..(9): X is K, R or H for basic amino acids
  MISC_FEATURE (10)..(10): X is F or P
  MISC_FEATURE (11)..(11): X is I, L or V
  MISC_FEATURE (12)..(12): X is M or Nle (Norleucine)
  MISC_FEATURE (13)..(13): X is N or Q for amidated amino acids
  MISC_FEATURE (14)..(14): X is K, R or H for basic amino acids
  MISC_FEATURE (15)..(15): X is I, L or V
  MISC_FEATURE (16)..(16): X is F or P
  MISC_FEATURE (17)..(17): X is I, L or V
XXXXXXXXXXXXXXXXX

SEQ ID NO: 763 - protein, 9 aa, Artificial
  Completely synthesized peptide construct
AYMTMKIRN

SEQ ID NO: 764 - protein, 9 aa, Artificial
  Completely synthesized peptide construct
  MISC_FEATURE (1)..(1): X is A and G
  MISC_FEATURE (2)..(2): X is F, W or Y for aromatic amino acids
  MISC_FEATURE (3)..(3): X is M or Nle (Norleucine)
  MISC_FEATURE (4)..(4): X is T or S
  MISC_FEATURE (5)..(5): X is M or Nle (Norleucine)
  MISC_FEATURE (6)..(6): X is K, R or H for basic amino acids
  MISC_FEATURE (7)..(7): X is I, L or V
  MISC_FEATURE (8)..(8): X is K, R or H for basic amino acids
  MISC_FEATURE (9)..(9): X is N or Q for amidated amino acids
XXXXXXXXX

SEQ ID NO: 765 - protein, 10 aa, Artificial
  Completely synthesized peptide construct
  MISC_FEATURE (1)..(1): X is acetyl or propionyl group, D glycine or D alanine, cyclohexylalanine at amino terminus
  MISC_FEATURE (2)..(2): X is A and G
  MISC_FEATURE (3)..(3): X is F, W or Y for aromatic amino acids
  MISC_FEATURE (4)..(4): X is M or Nle (Norleucine)
  MISC_FEATURE (5)..(5): X is T or S
  MISC_FEATURE (6)..(6): X is M or Nle (Norleucine)
  MISC_FEATURE (7)..(7): X is K, R or H for basic amino acids
  MISC_FEATURE (8)..(8): X is I, L or V
  MISC_FEATURE (9)..(9): X is K, R or H for basic amino acids
  MISC_FEATURE (10)..(10): X is N or Q for amidated amino acids
XXXXXXXXXX

SEQ ID NO: 766 - protein, 17 aa, Artificial
  Completely synthesized peptide construct
SVKLSIAVKNKAEFHQS

SEQ ID NO: 767 - protein, 17 aa, Artificial
  Completely synthesized peptide construct
SVKLSIAVKNKAEFHQS

SEQ ID NO: 768 - protein, 17 aa, Artificial
  Completely synthesized peptide construct
SVKLSIAVKNKAEFHQS

SEQ ID NO: 769 - protein, 25 aa, Artificial
  Completely synthesized peptide construct
KRKLEGDLKLTQESIMDLENDKQQL

SEQ ID NO: 770 - protein, 25 aa, Artificial
  Completely synthesized peptide construct
  MISC_FEATURE (1)..(1): X is K, R or H for basic amino acids
  MISC_FEATURE (2)..(2): X is K, R or H for basic amino acids
  MISC_FEATURE (3)..(3): X is K, R or H for basic amino acids
  MISC_FEATURE (4)..(4): X is I, L or V
  MISC_FEATURE (5)..(5): X is D and E for acidic amino acids
  MISC_FEATURE (6)..(6): X is A and G
  MISC_FEATURE (7)..(7): X is D and E for acidic amino acids
  MISC_FEATURE (8)..(8): X is I, L or V
  MISC_FEATURE (9)..(9): X is K, R or H for basic amino acids
  MISC_FEATURE (10)..(10): X is I, L or V
  MISC_FEATURE (11)..(11): X is T or S
  MISC_FEATURE (12)..(12): X is N or Q for amidated amino acids
  MISC_FEATURE (13)..(13): X is I, L or V
  MISC_FEATURE (14)..(14): X is T or S
  MISC_FEATURE (15)..(15): X is I, L or V
  MISC_FEATURE (16)..(16): X is M or Nle (Norleucine)
  MISC_FEATURE (17)..(17): X is D and E for acidic amino acids
  MISC_FEATURE (18)..(18): X is I, L or V
  MISC_FEATURE (19)..(19): X is D and E for acidic amino acids
  MISC_FEATURE (20)..(20): X is N or Q for amidated amino acids
  MISC_FEATURE (21)..(21): X is D and E for acidic amino acids
  MISC_FEATURE (22)..(22): X is K, R or H for basic amino acids
  MISC_FEATURE (23)..(23): X is N or Q for amidated amino acids
  MISC_FEATURE (24)..(24): X is N or Q for amidated amino acids
  MISC_FEATURE (25)..(25): X is I, L or V
XXXXXXXXXXXXXXXXXXXXXXXXX

SEQ ID NO: 771 - protein, 26 aa, Artificial
  Completely synthesized peptide construct
  MISC_FEATURE (1)..(1): X is acetyl or propionyl group, D glycine or D alanine, cyclohexylalanine at amino terminus
  MISC_FEATURE (2)..(2): X is K, R or H for basic amino acids
  MISC_FEATURE (3)..(3): X is K, R or H for basic amino acids
  MISC_FEATURE (4)..(4): X is K, R or H for basic amino acids
  MISC_FEATURE (5)..(5): X is I, L or V
  MISC_FEATURE (6)..(6): X is D and E for acidic amino acids
  MISC_FEATURE (7)..(7): X is A and G
  MISC_FEATURE (8)..(8): X is D and E for acidic amino acids
  MISC_FEATURE (9)..(9): X is I, L or V
  MISC_FEATURE (10)..(10): X is K, R or H for basic amino acids
  MISC_FEATURE (11)..(11): X is I, L or V
  MISC_FEATURE (12)..(12): X is T or S
  MISC_FEATURE (13)..(13): X is N or Q for amidated amino acids
  MISC_FEATURE (14)..(14): X is I, L or V
  MISC_FEATURE (15)..(15): X is T or S
  MISC_FEATURE (16)..(16): X is I, L or V
  MISC_FEATURE (17)..(17): X is M or Nle (Norleucine)
  MISC_FEATURE (18)..(18): X is D and E for acidic amino groups
  MISC_FEATURE (19)..(19): X is I, L or V
  MISC_FEATURE (20)..(20): X is D and E for acidic amino acids
  MISC_FEATURE (21)..(21): X is N or Q for amidated amino acids
  MISC_FEATURE (22)..(22): X is D and E for acidic amino acids
  MISC_FEATURE (23)..(23): X is K, R or H for basic amino acids
  MISC_FEATURE (24)..(24): X is N or Q for amidated amino acids
  MISC_FEATURE (25)..(25): X is N or Q for amidated amino acids
  MISC_FEATURE (26)..(26): X is I, L or V
XXXXXXXXXXXXXXXXXXXXXXXXXX

SEQ ID NO: 772 - protein, 22 aa, Artificial
  Completely synthesized peptide construct
  MISC_FEATURE (1)..(1): X is K, R or H for basic amino acids
  MISC_FEATURE (2)..(2): X is K, R or H for basic amino acids
  MISC_FEATURE (3)..(3): X is K, R or H for basic amino acids
  MISC_FEATURE (4)..(4): X is GabaX for X2X3 or X3X2 or X2X3 or X3X2 or X3X3 or X2X2
  MISC_FEATURE (5)..(5): X is A and G
  MISC_FEATURE (6)..(6): X is GabaX for X2X3 or X3X2 or X2X3 or X3X2 or X3X3 or X2X2
  MISC_FEATURE (7)..(7): X is K, R or H for basic amino acids
  MISC_FEATURE (8)..(8): X is I, L or V
  MISC_FEATURE (9)..(9): X is T or S
  MISC_FEATURE (10)..(10): X is N or Q for amidated amino acids
  MISC_FEATURE (11)..(11): X is I, L or V
  MISC_FEATURE (12)..(12): X is T or S
  MISC_FEATURE (13)..(13): X is I, L or V
  MISC_FEATURE (14)..(14): X is M or Nle (Norleucine)
  MISC_FEATURE (15)..(15): X is GabaX for X2X3 or X3X2 or X2X3 or X3X2 or X3X3 or X2X2
  MISC_FEATURE (16)..(16): X is D and E for acidic amino acids
  MISC_FEATURE (17)..(17): X is N or Q for amidated amino acids
  MISC_FEATURE (18)..(18): X is D and E for acidic amino acids
  MISC_FEATURE (19)..(19): X is K, R or H for basic amino acids
  MISC_FEATURE (20)..(20): X is N or Q for amidated amino acids
  MISC_FEATURE (21)..(21): X is N or Q for amidated amino acids
  MISC_FEATURE (22)..(22): X is I, L or V
XXXXXXXXXXXXXXXXXXXXXX

SEQ ID NO: 773 - protein, 23 aa, Artificial
  Completely synthesized peptide construct
  MISC_FEATURE (1)..(1): X is acetyl or propionyl group, D glycine or D alanine, cyclohexylalanine at amino terminus
  MISC_FEATURE (2)..(2): X is K, R or H for basic amino acids
  MISC_FEATURE (3)..(3): X is K, R or H for basic amino acids
  MISC_FEATURE (4)..(4): X is K, R or H for basic amino acids
  MISC_FEATURE (5)..(5): X is GabaX for X2X3 or X3X2 or X2X3 or X3X2 or X3X3 or X2X2
  MISC_FEATURE (6)..(6): X is A and G
  MISC_FEATURE (7)..(7): X is GabaX for X2X3 or X3X2 or X2X3 or X3X2 or X3X3 or X2X2
  MISC_FEATURE (8)..(8): X is K, R or H for basic amino acids
  MISC_FEATURE (9)..(9): X is I, L or V
  MISC_FEATURE (10)..(10): X is T or S
  MISC_FEATURE (11)..(11): X is N or Q for amidated amino acids
  MISC_FEATURE (12)..(12): X is I, L or V
  MISC_FEATURE (13)..(13): X is T or S
  MISC_FEATURE (14)..(14): X is I, L or V
  MISC_FEATURE (15)..(15): X is M or Nle (Norleucine)
  MISC_FEATURE (16)..(16): X is GabaX for X2X3 or X3X2 or X2X3 or X3X2 or X3X3 or X2X2
  MISC_FEATURE (17)..(17): X is D and E for acidic amino acids
  MISC_FEATURE (18)..(18): X is N or Q for amidated amino acids
  MISC_FEATURE (19)..(19): X is D and E for acidic amino acids
  MISC_FEATURE (20)..(20): X is K, R or H for basic amino acids
  MISC_FEATURE (21)..(21): X is N or Q for amidated amino acids
  MISC_FEATURE (22)..(22): X is N or Q for amidated amino acids
  MISC_FEATURE (23)..(23): X is I, L or V
XXXXXXXXXXXXXXXXXXXXXXX

SEQ ID NO: 774 - protein, 23 aa, Artificial
  Completely synthesized peptide construct
  MISC_FEATURE (1)..(1): X is K, R or H for basic amino acids
  MISC_FEATURE (2)..(2): X is K, R or H for basic amino acids
  MISC_FEATURE (3)..(3): X is K, R or H for basic amino acids
  MISC_FEATURE (4)..(4): X is I, L or V
  MISC_FEATURE (5)..(5): X is D and E for acidic amino acids
  MISC_FEATURE (6)..(6): X is A and G
  MISC_FEATURE (7)..(7): X is D and E for acidic amino acids
  MISC_FEATURE (8)..(8): X is I, L or V
  MISC_FEATURE (9)..(9): X is K, R or H for basic amino acids
  MISC_FEATURE (10)..(10): X is I, L or V
  MISC_FEATURE (11)..(11): X is T or S
  MISC_FEATURE (12)..(12): X is N or Q for amidated amino acids
  MISC_FEATURE (13)..(13): X is I, L or V
  MISC_FEATURE (14)..(14): X is T or S
  MISC_FEATURE (15)..(15): X is I, L or V
  MISC_FEATURE (16)..(16): X is M or Nle (Norleucine)
  MISC_FEATURE (17)..(17): X is 5-aminopentanoic acid for replacement of 3 or 4 amino acids of X2 and X3
  MISC_FEATURE (18)..(18): X is N or Q for amidated amino acids
  MISC_FEATURE (19)..(19): X is D and E for acidic amino acids
  MISC_FEATURE (20)..(20): X is K, R or H for basic amino acids
  MISC_FEATURE (21)..(21): X is N or Q for amidated amino acids
  MISC_FEATURE (22)..(22): X is N or Q for amidated amino acids
  MISC_FEATURE (23)..(23): X is I, L or V
XXXXXXXXXXXXXXXXXXXXXXX

SEQ ID NO: 775 - protein, 24 aa, Artificial
  Completely synthesized peptide construct
  MISC_FEATURE (1)..(1): X is acetyl or propionyl group, D glycine or D alanine, cyclohexylalanine at amino terminus
  MISC_FEATURE (2)..(2): X is K, R or H for basic amino acids
  MISC_FEATURE (3)..(3): X is K, R or H for basic amino acids
  MISC_FEATURE (4)..(4): X is K, R or H for basic amino acids
  MISC_FEATURE (5)..(5): X is I, L or V
  MISC_FEATURE (6)..(6): X is D and E for acidic amino acids
  MISC_FEATURE (7)..(7): X is A and G
  MISC_FEATURE (8)..(8): X is D and E for acidic amino acids
  MISC_FEATURE (9)..(9): X is I, L or V
  MISC_FEATURE (10)..(10): X is K, R or H for basic amino acids
  MISC_FEATURE (11)..(11): X is I, L or V
  MISC_FEATURE (12)..(12): X is T or S
  MISC_FEATURE (13)..(13): X is N or Q for amidated amino acids
  MISC_FEATURE (14)..(14): X is I, L or V
  MISC_FEATURE (15)..(15): X is T or S
  MISC_FEATURE (16)..(16): X is I, L or V
  MISC_FEATURE (17)..(17): X is M or Nle (Norleucine)
  MISC_FEATURE (18)..(18): X is 5-aminopentanoic acid for replacement of 3 or 4 amino acids of X2 and X3
  MISC_FEATURE (19)..(19): X is N or Q for amidated amino acids
  MISC_FEATURE (20)..(20): X is D and E for acidic amino acids
  MISC_FEATURE (21)..(21): X is K, R or H for basic amino acids
  MISC_FEATURE (22)..(22): X is N or Q for amidated amino acids
  MISC_FEATURE (23)..(23): X is N or Q for amidated amino acids
  MISC_FEATURE (24)..(24): X is I, L or V
XXXXXXXXXXXXXXXXXXXXXXXX

SEQ ID NO: 776 - protein, 19 aa, Artificial
  Completely synthesized peptide construct
VRRLAMENNIKLSEVVGSG

SEQ ID NO: 777 - protein, 19 aa, Artificial
  Completely synthesized peptide construct
  MISC_FEATURE (1)..(1): X is I, L or V
  MISC_FEATURE (2)..(2): X is K, R or H for basic amino acids
  MISC_FEATURE (3)..(3): X is K, R or H for basic amino acids
  MISC_FEATURE (4)..(4): X is I, L or V
  MISC_FEATURE (5)..(5): X is A and G
  MISC_FEATURE (6)..(6): X is M or Nle (Norleucine)
  MISC_FEATURE (7)..(7): X is D and E for acidic amino acids
  MISC_FEATURE (8)..(8): X is N or Q for amidated amino acids
  MISC_FEATURE (9)..(9): X is N or Q for amidated amino acids
  MISC_FEATURE (10)..(10): X is I, L or V
  MISC_FEATURE (11)..(11): X is K, R or H for basic amino acids
  MISC_FEATURE (12)..(12): X is I, L or V
  MISC_FEATURE (13)..(13): X is T or S
  MISC_FEATURE (14)..(14): X is D and E for acidic amino acids
  MISC_FEATURE (15)..(15): X is I, L or V
  MISC_FEATURE (16)..(16): X is I, L or V
  MISC_FEATURE (17)..(17): X is A and G
  MISC_FEATURE (18)..(18): X is T or S
  MISC_FEATURE (19)..(19): X is A and G
XXXXXXXXXXXXXXXXXXX

SEQ ID NO: 778 - protein, 20 aa, Artificial
  Completely synthesized peptide construct
  MISC_FEATURE (1)..(1): X is acetyl or propionyl group, D glycine or D alanine, cyclohexylalanine at amino terminus
  MISC_FEATURE (2)..(2): X is I, L or V
  MISC_FEATURE (3)..(3): X is K, R or H for basic amino acids
  MISC_FEATURE (4)..(4): X is K, R or H for basic amino acids
  MISC_FEATURE (5)..(5): X is I, L or V
  MISC_FEATURE (6)..(6): X is A and G
  MISC_FEATURE (7)..(7): X is M or Nle (Norleucine)
  MISC_FEATURE (8)..(8): X is D and E for acidic amino acids
  MISC_FEATURE (9)..(9): X is N or Q for amidated amino acids
  MISC_FEATURE (10)..(10): X is N or Q for amidated amino acids
  MISC_FEATURE (11)..(11): X is I, L or V
  MISC_FEATURE (12)..(12): X is K, R or H for basic amino acids
  MISC_FEATURE (13)..(13): X is I, L or V
  MISC_FEATURE (14)..(14): X is T or S
  MISC_FEATURE (15)..(15): X is D and E for acidic amino acids
  MISC_FEATURE (16)..(16): X is I, L or V
  MISC_FEATURE (17)..(17): X is I, L or V
  MISC_FEATURE (18)..(18): X is A and G
  MISC_FEATURE (19)..(19): X is T or S
  MISC_FEATURE (20)..(20): X is A and G
XXXXXXXXXXXXXXXXXXXX

SEQ ID NO: 779 - protein, 18 aa, Artificial
  Completely synthesized peptide construct
  MISC_FEATURE (1)..(1): X is I, L or V
  MISC_FEATURE (2)..(2): X is K, R or H for basic amino acids
  MISC_FEATURE (3)..(3): X is K, R or H for basic amino acids
  MISC_FEATURE (4)..(4): X is I, L or V
  MISC_FEATURE (5)..(5): X is A and G
  MISC_FEATURE (6)..(6): X is M or Nle (Norleucine)
  MISC_FEATURE (7)..(7): X is D and E for acidic amino acids
  MISC_FEATURE (8)..(8): X is N or Q for amidated amino acids
  MISC_FEATURE (9)..(9): X is N or Q for amidated amino acids
  MISC_FEATURE (10)..(10): X is I, L or V
  MISC_FEATURE (11)..(11): X is K, R or H for basic amino acids
  MISC_FEATURE (12)..(12): X is I, L or V
  MISC_FEATURE (13)..(13): X is T or S
  MISC_FEATURE (14)..(14): X is GabaX for X2X3 or X3X2 or X2X3 or X3X2 or X3X3 or X2X2
  MISC_FEATURE (15)..(15): X is I, L or V
  MISC_FEATURE (16)..(16): X is A and G
  MISC_FEATURE (17)..(17): X is T or S
  MISC_FEATURE (18)..(18): X is A and G
XXXXXXXXXXXXXXXXXX

SEQ ID NO: 780 - protein, 17 aa, Artificial
  Completely synthesized peptide construct
  MISC_FEATURE (1)..(1): X is I, L or V
  MISC_FEATURE (2)..(2): X is K, R or H for basic amino acids
  MISC_FEATURE (3)..(3): X is K, R or H for basic amino acids
  MISC_FEATURE (4)..(4): X is I, L or V
  MISC_FEATURE (5)..(5): X is A and G
  MISC_FEATURE (6)..(6): X is M or Nle (Norleucine)
  MISC_FEATURE (7)..(7): X is D and E for acidic amino acids
  MISC_FEATURE (8)..(8): X is N or Q for amidated amino acids
  MISC_FEATURE (9)..(9): X is N or Q for amidated amino acids
  MISC_FEATURE (10)..(10): X is I, L or V
  MISC_FEATURE (11)..(11): X is K, R or H for basic amino acids
  MISC_FEATURE (12)..(12): X is I, L or V
  MISC_FEATURE (13)..(13): X is T or S
  MISC_FEATURE (14)..(14): X is 5-aminopentanoic acid for replacement of 3 or 4 amino acids of X2 and X3
  MISC_FEATURE (15)..(15): X is A and G
  MISC_FEATURE (16)..(16): X is T or S
  MISC_FEATURE (17)..(17): X is A and G
XXXXXXXXXXXXXXXXX

SEQ ID NO: 781 - protein, 19 aa, Artificial
  Completely synthesized peptide construct
  MISC_FEATURE (1)..(1): X is acetyl or propionyl group, D glycine or D alanine, cyclohexylalanine at amino terminus
  MISC_FEATURE (2)..(2): X is I, L or V
  MISC_FEATURE (3)..(3): X is K, R or H for basic amino acids
  MISC_FEATURE (4)..(4): X is K, R or H for basic amino acids
  MISC_FEATURE (5)..(5): X is I, L or V
  MISC_FEATURE (6)..(6): X is A and G
  MISC_FEATURE (7)..(7): X is M or Nle (Norleucine)
  MISC_FEATURE (8)..(8): X is D and E for acidic amino acids
  MISC_FEATURE (9)..(9): X is N or Q for amidated amino acids
  MISC_FEATURE (10)..(10): X is N or Q for amidated amino acids
  MISC_FEATURE (11)..(11): X is I, L or V
  MISC_FEATURE (12)..(12): X is K, R or H for basic amino acids
  MISC_FEATURE (13)..(13): X is I, L or V
  MISC_FEATURE (14)..(14): X is T or S
  MISC_FEATURE (15)..(15): X is GabaX for X2X3 or X3X2 or X2X3 or X3X2 or X3X3 or X2X2
  MISC_FEATURE (16)..(16): X is I, L or V
  MISC_FEATURE (17)..(17): X is A and G
  MISC_FEATURE (18)..(18): X is T or S
  MISC_FEATURE (19)..(19): X is A and G
XXXXXXXXXXXXXXXXXXX

SEQ ID NO: 782 - protein, 18 aa, Artificial
  Completely synthesized peptide construct
  MISC_FEATURE (1)..(1): X is acetyl or propionyl group, D glycine or D alanine, cyclohexylalanine at amino terminus
  MISC_FEATURE (2)..(2): X is I, L or V
  MISC_FEATURE (3)..(3): X is K, R or H for basic amino acids
  MISC_FEATURE (4)..(4): X is K, R or H for basic amino acids
  MISC_FEATURE (5)..(5): X is I, L or V
  MISC_FEATURE (6)..(6): X is A and G
  MISC_FEATURE (7)..(7): X is M or Nle (Norleucine)
  MISC_FEATURE (8)..(8): X is D and E for acidic amino acids
  MISC_FEATURE (9)..(9): X is N or Q for amidated amino acids
  MISC_FEATURE (10)..(10): X is N or Q for amidated amino acids
  MISC_FEATURE (11)..(11): X is I, L or V
  MISC_FEATURE (12)..(12): X is K, R or H for basic amino acids
  MISC_FEATURE (13)..(13): X is I, L or V
  MISC_FEATURE (14)..(14): X is T or S
  MISC_FEATURE (15)..(15): X is 5-aminopentanoic acid for replacement of 3 or 4 amino acids of X2 and X3
  MISC_FEATURE (16)..(16): X is A and G
  MISC_FEATURE (17)..(17): X is T or S
  MISC_FEATURE (18)..(18): X is A and G
XXXXXXXXXXXXXXXXXX

SEQ ID NO: 783 - protein, 18 aa, Artificial
  Completely synthesized peptide construct
KEALISSLTRGKLTYTQQ

SEQ ID NO: 784 - protein, 18 aa, Artificial
  Completely synthesized peptide construct
  MISC_FEATURE (1)..(1): X is K, R or H for basic amino acids
  MISC_FEATURE (2)..(2): X is D and E for acidic amino acids
  MISC_FEATURE (3)..(3): X is A and G
  MISC_FEATURE (4)..(4): X is I, L or V
  MISC_FEATURE (5)..(5): X is I, L or V
  MISC_FEATURE (6)..(6): X is T or S
  MISC_FEATURE (7)..(7): X is T or S
  MISC_FEATURE (8)..(8): X is I, L or V
  MISC_FEATURE (9)..(9): X is T or S
  MISC_FEATURE (10)..(10): X is K, R or H for basic amino acids
  MISC_FEATURE (11)..(11): X is A and G
  MISC_FEATURE (12)..(12): X is K, R or H for basic amino acids
  MISC_FEATURE (13)..(13): X is I, L or V
  MISC_FEATURE (14)..(14): X is T or S
  MISC_FEATURE (15)..(15): X is F, W or Y for aromatic amino acids
  MISC_FEATURE (16)..(16): X is T or S
  MISC_FEATURE (17)..(17): X is N or Q for amidated amino acids
  MISC_FEATURE (18)..(18): X is N or Q for amidated amino acids
XXXXXXXXXXXXXXXXXX

SEQ ID NO: 785 - protein, 19 aa, Artificial
  Completely synthesized peptide construct
  MISC_FEATURE (1)..(1): X is acetyl or propionyl group, D glycine or D alanine, cyclohexylalanine at amino terminus
  MISC_FEATURE (2)..(2): X is K, R or H for basic amino acids
  MISC_FEATURE (3)..(3): X is D and E for acidic amino acids
  MISC_FEATURE (4)..(4): X is A and G
  MISC_FEATURE (5)..(5): X is I, L or V
  MISC_FEATURE (6)..(6): X is I, L or V
  MISC_FEATURE (7)..(7): X is T or S
  MISC_FEATURE (8)..(8): X is T or S
  MISC_FEATURE (9)..(9): X is I, L or V
  MISC_FEATURE (10)..(10): X is T or S
  MISC_FEATURE (11)..(11): X is K, R or H for basic amino acids
  MISC_FEATURE (12)..(12): X is A and G
  MISC_FEATURE (13)..(13): X is K, R or H for basic amino acids
  MISC_FEATURE (14)..(14): X is I, L or V
  MISC_FEATURE (15)..(15): X is T or S
  MISC_FEATURE (16)..(16): X is F, W or Y for aromatic amino acids
  MISC_FEATURE (17)..(17): X is T or S
  MISC_FEATURE (18)..(18): X is N or Q for amidated amino acids
  MISC_FEATURE (19)..(19): X is N or Q for amidated amino acids
XXXXXXXXXXXXXXXXXXX

SEQ ID NO: 786 - protein, 17 aa, Artificial
  Completely synthesized peptide construct
  MISC_FEATURE (1)..(1): X is K, R or H for basic amino acids
  MISC_FEATURE (2)..(2): X is D and E for acidic amino acids
  MISC_FEATURE (3)..(3): X is A and G
  MISC_FEATURE (4)..(4): X is GabaX for X2X3 or X3X2 or X2X3 or X3X2 or X3X3 or X2X2
  MISC_FEATURE (5)..(5): X is T or S
  MISC_FEATURE (6)..(6): X is T or S
  MISC_FEATURE (7)..(7): X is I, L or V
  MISC_FEATURE (8)..(8): X is T or S
  MISC_FEATURE (9)..(9): X is K, R or H for basic amino acids
  MISC_FEATURE (10)..(10): X is A and G
  MISC_FEATURE (11)..(11): X is K, R or H for basic amino acids
  MISC_FEATURE (12)..(12): X is I, L or V
  MISC_FEATURE (13)..(13): X is T or S
  MISC_FEATURE (14)..(14): X is F, W or Y for aromatic amino acids
  MISC_FEATURE (15)..(15): X is T or S
  MISC_FEATURE (16)..(16): X is N or Q for amidated amino acids
  MISC_FEATURE (17)..(17): X is N or Q for amidated amino acids
XXXXXXXXXXXXXXXXX

SEQ ID NO: 787 - protein, 18 aa, Artificial
  Completely synthesized peptide construct
  MISC_FEATURE (1)..(1): X is acetyl or propionyl group, D glycine or D alanine, cyclohexylalanine at amino terminus
  MISC_FEATURE (2)..(2): X is K, R or H for basic amino acids
  MISC_FEATURE (3)..(3): X is D and E for acidic amino acids
  MISC_FEATURE (4)..(4): X is A and G
  MISC_FEATURE (5)..(5): X is GabaX for X2X3 or X3X2 or X2X3 or X3X2 or X3X3 or X2X2
  MISC_FEATURE (6)..(6): X is T or S
  MISC_FEATURE (7)..(7): X is T or S
  MISC_FEATURE (8)..(8): X is I, L or V
  MISC_FEATURE (9)..(9): X is T or S
  MISC_FEATURE (10)..(10): X is K, R or H for basic amino acids
  MISC_FEATURE (11)..(11): X is A and G
  MISC_FEATURE (12)..(12): X is K, R or H for basic amino acids
  MISC_FEATURE (13)..(13): X is I, L or V
  MISC_FEATURE (14)..(14): X is T or S
  MISC_FEATURE (15)..(15): X is F, W or Y for aromatic amino acids
  MISC_FEATURE (16)..(16): X is T or S
  MISC_FEATURE (17)..(17): X is N or Q for amidated amino acids
  MISC_FEATURE (18)..(18): X is N or Q for amidated amino acids
XXXXXXXXXXXXXXXXXX

SEQ ID NO: 788 - protein, 18 aa, Artificial
  Completely synthesized peptide construct
SERVQLLHSQNTSLINQK

SEQ ID NO: 789 - protein, 18 aa, Artificial
  Completely synthesized peptide construct
  MISC_FEATURE (1)..(1): X is T or S
  MISC_FEATURE (2)..(2): X is D and E for acidic amino acids
  MISC_FEATURE (3)..(3): X is K, R or H for basic amino acids
  MISC_FEATURE (4)..(4): X is I, L or V
  MISC_FEATURE (5)..(5): X is N or Q for amidated amino acids
  MISC_FEATURE (6)..(6): X is I, L or V
  MISC_FEATURE (7)..(7): X is I, L or V
  MISC_FEATURE (8)..(8): X is K, R or H for basic amino acids
  MISC_FEATURE (9)..(9): X is T or S
  MISC_FEATURE (10)..(10): X is N or Q for amidated amino acids
  MISC_FEATURE (11)..(11): X is N or Q for amidated amino acids
  MISC_FEATURE (12)..(12): X is T or S
  MISC_FEATURE (13)..(13): X is T or S
  MISC_FEATURE (14)..(14): X is I, L or V
  MISC_FEATURE (15)..(15): X is I, L or V
  MISC_FEATURE (16)..(16): X is T or S
  MISC_FEATURE (17)..(17): X is T or S
  MISC_FEATURE (18)..(18): X is K, R or H for basic amino acids
XXXXXXXXXXXXXXXXXX

SEQ ID NO: 790 - protein, 18 aa, Artificial
  Completely synthesized peptide construct
  MISC_FEATURE (1)..(1): X is T or S
  MISC_FEATURE (2)..(2): X is D and E for acidic amino acids
  MISC_FEATURE (3)..(3): X is K, R or H for basic amino acids
  MISC_FEATURE (4)..(4): X is I, L or V
  MISC_FEATURE (5)..(5): X is N or Q for amidated amino acids
  MISC_FEATURE (6)..(6): X is I, L or V
  MISC_FEATURE (7)..(7): X is I, L or V
  MISC_FEATURE (8)..(8): X is K, R or H for basic amino acids
  MISC_FEATURE (9)..(9): X is T or S
  MISC_FEATURE (10)..(10): X is N or Q for amidated amino acids
  MISC_FEATURE (11)..(11): X is N or Q for amidated amino acids
  MISC_FEATURE (12)..(12): X is T or S
  MISC_FEATURE (13)..(13): X is T or S
  MISC_FEATURE (14)..(14): X is I, L or V
  MISC_FEATURE (15)..(15): X is I, L or V
  MISC_FEATURE (16)..(16): X is T or S
  MISC_FEATURE (17)..(17): X is T or S
  MISC_FEATURE (18)..(18): X is K, R or H for basic amino acids
XXXXXXXXXXXXXXXXXX

SEQ ID NO: 791 - protein, 19 aa, Artificial
  Completely synthesized peptide construct
  MISC_FEATURE (1)..(1): X is acetyl or propionyl group, D glycine or D alanine, cyclohexylalanine at amino terminus
  MISC_FEATURE (2)..(2): X is T or S
  MISC_FEATURE (3)..(3): X is D and E for acidic amino acids
  MISC_FEATURE (4)..(4): X is K, R or H for basic amino acids
  MISC_FEATURE (5)..(5): X is I, L or V
  MISC_FEATURE (6)..(6): X is N or Q for amidated amino acids
  MISC_FEATURE (7)..(7): X is I, L or V
  MISC_FEATURE (8)..(8): X is I, L or V
  MISC_FEATURE (9)..(9): X is K, R or H for basic amino acids
  MISC_FEATURE (10)..(10): X is T or S
  MISC_FEATURE (11)..(11): X is N or Q for amidated amino acids
  MISC_FEATURE (12)..(12): X is N or Q for amidated amino acids
  MISC_FEATURE (13)..(13): X is T or S
  MISC_FEATURE (14)..(14): X is T or S
  MISC_FEATURE (15)..(15): X is I, L or V
  MISC_FEATURE (16)..(16): X is I, L or V
  MISC_FEATURE (17)..(17): X is T or S
  MISC_FEATURE (18)..(18): X is T or S
  MISC_FEATURE (19)..(19): X is K, R or H for basic amino acids
XXXXXXXXXXXXXXXXXXX

SEQ ID NO: 792 - protein, 17 aa, Artificial
  Completely synthesized peptide construct
  MISC_FEATURE (1)..(1): X is acetyl or propionyl group, D glycine or D alanine, cyclohexylalanine at amino terminus
  MISC_FEATURE (2)..(2): X is T or S
  MISC_FEATURE (3)..(3): X is D and E for acidic amino acids
  MISC_FEATURE (4)..(4): X is K, R or H for basic amino acids
  MISC_FEATURE (5)..(5): X is I, L or V
  MISC_FEATURE (6)..(6): X is N or Q for amidated amino acids
  MISC_FEATURE (7)..(7): X is GabaX for X2X3 or X3X2 or X2X3 or X3X2 or X3X3 or X2X2
  MISC_FEATURE (8)..(8): X is K, R or H for basic amino acids
  MISC_FEATURE (9)..(9): X is T or S
  MISC_FEATURE (10)..(10): X is N or Q for amidated amino acids
  MISC_FEATURE (11)..(11): X is N or Q for amidated amino acids
  MISC_FEATURE (12)..(12): X is T or S
  MISC_FEATURE (13)..(13): X is T or S
  MISC_FEATURE (14)..(14): X is GabaX for X2X3 or X3X2 or X2X3 or X3X2 or X3X3 or X2X2
  MISC_FEATURE (15)..(15): X is T or S
  MISC_FEATURE (16)..(16): X is T or S
  MISC_FEATURE (17)..(17): X is K, R or H for basic amino acids
XXXXXXXXXXXXXXXXX

SEQ ID NO: 793 - protein, 18 aa, Artificial
  Completely synthesized peptide construct
  MISC_FEATURE (1)..(1): X is D and E for acidic amino acids
  MISC_FEATURE (2)..(2): X is A and G
  MISC_FEATURE (3)..(3): X is N or Q for amidated amino acids
  MISC_FEATURE (4)..(4): X is D and E for acidic amino acids
  MISC_FEATURE (5)..(5): X is D and E for acidic amino acids
  MISC_FEATURE (6)..(6): X is K, R or H for basic amino acids
  MISC_FEATURE (7)..(7): X is A and G
  MISC_FEATURE (8)..(8): X is A and G
  MISC_FEATURE (9)..(9): X is I, L or V
  MISC_FEATURE (10)..(10): X is I, L or V
  MISC_FEATURE (11)..(11): X is C or S
  MISC_FEATURE (12)..(12): X is T or S
  MISC_FEATURE (13)..(13): X is A and G
  MISC_FEATURE (14)..(14): X is I, L or V
  MISC_FEATURE (15)..(15): X is I, L or V
  MISC_FEATURE (16)..(16): X is A and G
  MISC_FEATURE (17)..(17): X is A and G
  MISC_FEATURE (18)..(18): X is A and G
XXXXXXXXXXXXXXXXXX

SEQ ID NO: 794 - protein, 19 aa, Artificial
  Completely synthesized peptide construct
  MISC_FEATURE (1)..(1): X is acetyl or propionyl group, D glycine or D alanine, cyclohexylalanine at amino terminus
  MISC_FEATURE (2)..(2): X is D and E for acidic amino acids
  MISC_FEATURE (3)..(3): X is A and G
  MISC_FEATURE (4)..(4): X is N or Q for amidated amino acids
  MISC_FEATURE (5)..(5): X is D and E for acidic amino acids
  MISC_FEATURE (6)..(6): X is D and E for acidic amino acids
  MISC_FEATURE (7)..(7): X is K, R or H for basic amino acids
  MISC_FEATURE (8)..(8): X is A and G
  MISC_FEATURE (9)..(9): X is A and G
  MISC_FEATURE (10)..(10): X is I, L or V
  MISC_FEATURE (11)..(11): X is I, L or V
  MISC_FEATURE (12)..(12): X is C or S
  MISC_FEATURE (13)..(13): X is T or S
  MISC_FEATURE (14)..(14): X is A and G
  MISC_FEATURE (15)..(15): X is I, L or V
  MISC_FEATURE (16)..(16): X is I, L or V
  MISC_FEATURE (17)..(17): X is A and G
  MISC_FEATURE (18)..(18): X is A and G
  MISC_FEATURE (19)..(19): X is A and G
XXXXXXXXXXXXXXXXXXX

SEQ ID NO: 795 - protein, 16 aa, Artificial
  Completely synthesized peptide construct
  MISC_FEATURE (1)..(1): X is acetyl or propionyl group, D glycine or D alanine, cyclohexylalanine at amino terminus
  MISC_FEATURE (2)..(2): X is D and E for acidic amino acids
  MISC_FEATURE (3)..(3): X is A and G
  MISC_FEATURE (4)..(4): X is N or Q for amidated amino acids
  MISC_FEATURE (5)..(5): X is GabaX for X2X3 or X3X2 or X2X3 or X3X2 or X3X3 or X2X2
  MISC_FEATURE (6)..(6): X is K, R or H for basic amino acids
  MISC_FEATURE (7)..(7): X is A and G
  MISC_FEATURE (8)..(8): X is A and G
  MISC_FEATURE (9)..(9): X is GabaX for X2X3 or X3X2 or X2X3 or X3X2 or X3X3 or X2X2
  MISC_FEATURE (10)..(10): X is C or S
  MISC_FEATURE (11)..(11): X is T or S
  MISC_FEATURE (12)..(12): X is A and G
  MISC_FEATURE (13)..(13): X is GabaX for X2X3 or X3X2 or X2X3 or X3X2 or X3X3 or X2X2
  MISC_FEATURE (14)..(14): X is A and G
  MISC_FEATURE (15)..(15): X is A and G
  MISC_FEATURE (16)..(16): X is A and G
XXXXXXXXXXXXXXXX

SEQ ID NO: 796 - protein, 70 aa, Homo sapiens [sequence omitted]

SEQ ID NO: 797 - protein, 18 aa, Homo sapiens [sequence omitted]

SEQ ID NO: 798 - protein, 108 aa, Homo sapiens
KKPGESLKISCQGSGYNFNTYYIAWVRHMPGYGLEWMGIIYPDDSTIRYSPSFQGQVTISADKSTTTAYLQWNSLKASDTAMYYCARRVASALSYWYFDLWGQGTLVT

SEQ ID NO: 799 - protein, 93 aa, Homo sapiens [sequence omitted]

SEQ ID NO: 800 - protein, 30 aa, Artificial; identical to SEQ ID NO: 321
  Completely synthesized peptide construct

SEQ ID NO: 801 - protein, 31 aa, Artificial; identical to SEQ ID NO: 130
  Completely synthesized peptide construct
  MISC_FEATURE (1)..(1): X is D and E for acidic amino acids
  MISC_FEATURE (2)..(2): X is I, L or V
  MISC_FEATURE (3)..(3): X is I, L or V
  MISC_FEATURE (4)..(4): X is K, R or H for basic amino acids
  MISC_FEATURE (5)..(5): X is N or Q for amidated amino acids
  MISC_FEATURE (6)..(6): X is A and G
  MISC_FEATURE (7)..(7): X is D and E for acidic amino acids
  MISC_FEATURE (8)..(8): X is K, R or H for basic amino acids
  MISC_FEATURE (9)..(9): X is I, L or V
  MISC_FEATURE (10)..(10): X is D and E for acidic amino acids
  MISC_FEATURE (11)..(11): X is K, R or H for basic amino acids
  MISC_FEATURE (12)..(12): X is I, L or V
  MISC_FEATURE (13)..(13): X is D and E for acidic amino acids
  MISC_FEATURE (14)..(14): X is A and G
  MISC_FEATURE (15)..(15): X is A and G
  MISC_FEATURE (16)..(16): X is A and G
  MISC_FEATURE (17)..(17): X is acetyl or propionyl group, D glycine or D alanine, cyclohexylalanine at amino terminus
  MISC_FEATURE (18)..(18): X is C or S
  MISC_FEATURE (19)..(19): X is I, L or V
  MISC_FEATURE (20)..(20): X is K, R or H for basic amino acids
  MISC_FEATURE (21)..(21): X is I, L or V
  MISC_FEATURE (22)..(22): X is M or Nle (Norleucine)
  MISC_FEATURE (23)..(23): X is A and G
  MISC_FEATURE (24)..(24): X is T or S
  MISC_FEATURE (25)..(25): X is I, L or V
  MISC_FEATURE (26)..(26): X is F or P
  MISC_FEATURE (27)..(27): X is C or S
  MISC_FEATURE (28)..(28): X is C or S
  MISC_FEATURE (29)..(29): X is F, W or Y for aromatic amino acids
  MISC_FEATURE (30)..(30): X is A and G
  MISC_FEATURE (31)..(31): X is T or S

SEQ ID NO: 802 - protein, 33 aa, Artificial
  Completely synthesized peptide construct
DGQEEKAGVVSTGLIGGGDGQEEKAGVVSTGLI

SEQ ID NO: 803 - protein, 32 aa, Artificial; identical to SEQ ID NO: 160
  Completely synthesized peptide construct
  MISC_FEATURE (1)..(1): X is acetyl or propionyl group, D glycine or D alanine, cyclohexylalanine at amino terminus
  MISC_FEATURE (2)..(2): X is D and E for acidic amino acids
  MISC_FEATURE (3)..(3): X is A and G
  MISC_FEATURE (4)..(4): X is N or Q for amidated amino acids
  MISC_FEATURE (5)..(5): X is GabaX for X2X3 or X3X2 or X2X3 or X3X2 or X3X3 or X2X2
  MISC_FEATURE (6)..(6): X is K, R or H for basic amino acids
  MISC_FEATURE (7)..(7): X is A and G
  MISC_FEATURE (8)..(8): X is A and G
  MISC_FEATURE (9)..(9): X is GabaX for X2X3 or X3X2 or X2X3 or X3X2 or X3X3 or X2X2
  MISC_FEATURE (10)..(10): X is C or S
  MISC_FEATURE (11)..(11): X is T or S
  MISC_FEATURE (12)..(12): X is A and G
  MISC_FEATURE (13)..(13): X is GabaX for X2X3 or X3X2 or X2X3 or X3X2 or X3X3 or X2X2
  MISC_FEATURE (14)..(14): X is A and G
  MISC_FEATURE (15)..(15): X is A and G
  MISC_FEATURE (16)..(16): X is A and G
  MISC_FEATURE (17)..(17): X is A and G
  MISC_FEATURE (18)..(18): X is acetyl or propionyl group, D glycine or D alanine, cyclohexylalanine at amino terminus
  MISC_FEATURE (19)..(19): X is C or S
  MISC_FEATURE (20)..(20): X is K, R or H for basic amino acids
  MISC_FEATURE (21)..(21): X is I, L or V
  MISC_FEATURE (22)..(22): X is I, L or V
  MISC_FEATURE (23)..(23): X is D and E for acidic amino acids
  MISC_FEATURE (24)..(24): X is A and G
  MISC_FEATURE (25)..(25): X is I, L or V
  MISC_FEATURE (26)..(26): X is F, W or Y for aromatic amino acids
  MISC_FEATURE (27)..(27): X is I, L or V
  MISC_FEATURE (28)..(28): X is C or S
  MISC_FEATURE (29)..(29): X is A and G
  MISC_FEATURE (30)..(30): X is D and E for acidic amino acids
  MISC_FEATURE (31)..(31): X is K, R or H for basic amino acids
  MISC_FEATURE (32)..(32): X is A and G

SEQ ID NO: 804 - protein, 38 aa, Artificial
  Completely synthesized peptide construct
DGQEEKAGVVSTGLIGGGDGEAGKPGKAGERGPPGPQG

SEQ ID NO: 805 - protein, 37 aa, Artificial; identical to SEQ ID NO: 158
  Completely synthesized peptide construct
  MISC_FEATURE (1)..(1): X is acetyl or propionyl group, D glycine or D alanine, cyclohexylalanine at amino terminus
  MISC_FEATURE (2)..(2): X is D and E for acidic amino acids
  MISC_FEATURE (3)..(3): X is A and G
  MISC_FEATURE (4)..(4): X is N or Q for amidated amino acids
  MISC_FEATURE (5)..(5): X is GabaX for X2X3 or X3X2 or X2X3 or X3X2 or X3X3 or X2X2
  MISC_FEATURE (6)..(6): X is K, R or H for basic amino acids
  MISC_FEATURE (7)..(7): X is A and G
  MISC_FEATURE (8)..(8): X is A and G
  MISC_FEATURE (9)..(9): X is GabaX for X2X3 or X3X2 or X2X3 or X3X2 or X3X3 or X2X2
  MISC_FEATURE (10)..(10): X is C or S
  MISC_FEATURE (11)..(11): X is T or S
  MISC_FEATURE (12)..(12): X is A and G
  MISC_FEATURE (13)..(13): X is GabaX for X2X3 or X3X2 or X2X3 or X3X2 or X3X3 or X2X2
  MISC_FEATURE (14)..(14): X is A and G
  MISC_FEATURE (15)..(15): X is A and G
  MISC_FEATURE (16)..(16): X is A and G
  MISC_FEATURE (17)..(17): X is A and G
  MISC_FEATURE (18)..(18): X is D and E for acidic amino acids
  MISC_FEATURE (19)..(19): X is A and G
  MISC_FEATURE (20)..(20): X is D and E for acidic amino acids
  MISC_FEATURE (21)..(21): X is A and G
  MISC_FEATURE (22)..(22): X is A and G
  MISC_FEATURE (23)..(23): X is K, R or H for basic amino acids
  MISC_FEATURE (24)..(24): X is F or P
  MISC_FEATURE (25)..(25): X is A and G
  MISC_FEATURE (26)..(26): X is K, R or H for basic amino acids
  MISC_FEATURE (27)..(27): X is A and G
  MISC_FEATURE (28)..(28): X is A and G
  MISC_FEATURE (29)..(29): X is D and E for acidic amino acids
  MISC_FEATURE (30)..(30): X is K, R or H for basic amino acids
  MISC_FEATURE (31)..(31): X is A and G
  MISC_FEATURE (32)..(32): X is F or P
  MISC_FEATURE (33)..(33): X is F or P
  MISC_FEATURE (34)..(34): X is A and G
  MISC_FEATURE (35)..(35): X is F or P
  MISC_FEATURE (36)..(36): X is N or Q for amidated amino acids
  MISC_FEATURE (37)..(37): X is A and G

SEQ ID NO: 806 - protein, 33 aa, Artificial
  Completely synthesized peptide construct
DLLKNGERIEKVEGGGSVKLSIAVKNKAEFHQS

SEQ ID NO: 807 - protein, 33 aa, Artificial; identical to SEQ ID NO: 99
  Completely synthesized peptide construct
  MISC_FEATURE (1)..(1): X is D and E for acidic amino acids
  MISC_FEATURE (2)..(2): X is I, L or V
  MISC_FEATURE (3)..(3): X is I, L or V
  MISC_FEATURE (4)..(4): X is K, R or H for basic amino acids
  MISC_FEATURE (5)..(5): X is N or Q for amidated amino acids
  MISC_FEATURE (6)..(6): X is A and G
  MISC_FEATURE (7)..(7): X is D and E for acidic amino acids
  MISC_FEATURE (8)..(8): X is K, R or H for basic amino acids
  MISC_FEATURE (9)..(9): X is I, L or V
  MISC_FEATURE (10)..(10): X is D and E for acidic amino acids
  MISC_FEATURE (11)..(11): X is K, R or H for basic amino acids
  MISC_FEATURE (12)..(12): X is I, L or V
  MISC_FEATURE (13)..(13): X is D and E for acidic amino acids
  MISC_FEATURE (14)..(14): X is A and G
  MISC_FEATURE (15)..(15): X is A and G
  MISC_FEATURE (16)..(16): X is A and G
  MISC_FEATURE (17)..(17): X is T or S
  MISC_FEATURE (18)..(18): X is I, L or V
  MISC_FEATURE (19)..(19): X is K, R or H for basic amino acids
  MISC_FEATURE (20)..(20): X is I, L or V
  MISC_FEATURE (21)..(21): X is T or S
  MISC_FEATURE (22)..(22): X is I, L or V
  MISC_FEATURE (23)..(23): X is A and G
  MISC_FEATURE (24)..(24): X is I, L or V
  MISC_FEATURE (25)..(25): X is K, R or H for basic amino acids
  MISC_FEATURE (26)..(26): X is N or Q for amidated amino acids
  MISC_FEATURE (27)..(27): X is K, R or H for basic amino acids
  MISC_FEATURE (28)..(28): X is A and G
  MISC_FEATURE (29)..(29): X is D and E for acidic amino acids
  MISC_FEATURE (30)..(30): X is F or P
  MISC_FEATURE (31)..(31): X is K, R or H for basic amino acids
  MISC_FEATURE (32)..(32): X is N or Q for amidated amino acids
  MISC_FEATURE (33)..(33): X is T or S

SEQ ID NO: 808 - protein, 33 aa, Artificial
  Completely synthesized peptide construct
DLLKNGERIEKVEGGGNVREGIAFRPASKTFTV

SEQ ID NO: 809 - protein, 33 aa, Artificial; identical to SEQ ID NO: 99
  Completely synthesized peptide construct
  MISC_FEATURE (1)..(1): X is D and E for acidic amino acids
  MISC_FEATURE (2)..(2): X is I, L or V
  MISC_FEATURE (3)..(3): X is I, L or V
  MISC_FEATURE (4)..(4): X is K, R or H for basic amino acids
  MISC_FEATURE (5)..(5): X is N or Q for amidated amino acids
  MISC_FEATURE (6)..(6): X is A and G
  MISC_FEATURE (7)..(7): X is D and E for acidic amino acids
  MISC_FEATURE (8)..(8): X is K, R or H for basic amino acids
  MISC_FEATURE (9)..(9): X is I, L or V
  MISC_FEATURE (10)..(10): X is D and E for acidic amino acids
  MISC_FEATURE (11)..(11): X is K, R or H for basic amino acids
  MISC_FEATURE (12)..(12): X is I, L or V
  MISC_FEATURE (13)..(13): X is D and E for acidic amino acids
  MISC_FEATURE (14)..(14): X is A and G
  MISC_FEATURE (15)..(15): X is A and G
  MISC_FEATURE (16)..(16): X is A and G
  MISC_FEATURE (17)..(17): X is  N or Q for amidated amino acids
  MISC_FEATURE (18)..(18): X is I, L or V
  MISC_FEATURE (19)..(19): X is K, R or H for basic amino acids
  MISC_FEATURE (20)..(20): X is D and E for acidic amino acids
  MISC_FEATURE (21)..(21): X is A and G
  MISC_FEATURE (22)..(22): X is I, L or V
  MISC_FEATURE (23)..(23): X is A and G
  MISC_FEATURE (24)..(24): X is F or P
  MISC_FEATURE (25)..(25): X is K, R or H for basic amino acids
  MISC_FEATURE (26)..(26): X is F or P
  MISC_FEATURE (27)..(27): X is A and G
  MISC_FEATURE (28)..(28): X is T or S
  MISC_FEATURE (29)..(29): X is K, R or H for basic amino acids
  MISC_FEATURE (30)..(30): X is T or S
  MISC_FEATURE (31)..(31): X is F or P
  MISC_FEATURE (32)..(32): X is T or S
  MISC_FEATURE (33)..(33): X is I, L or V

SEQ ID NO: 810 - protein, 36 aa, Artificial
  Completely synthesized peptide construct
DLLKNGERIEKVEGGGGPTHLFQPSLVLDMAKVLLD

SEQ ID NO: 811 - protein, 36 aa, Artificial; identical to SEQ ID NO: 172
  Completely synthesized peptide construct
  MISC_FEATURE (1)..(1): X is D and E for acidic amino acids
  MISC_FEATURE (2)..(2): X is I, L or V
  MISC_FEATURE (3)..(3): X is I, L or V
  MISC_FEATURE (4)..(4): X is K, R or H for basic amino acids
  MISC_FEATURE (5)..(5): X is N or Q for amidated amino acids
  MISC_FEATURE (6)..(6): X is A and G
  MISC_FEATURE (7)..(7): X is D and E for acidic amino acids
  MISC_FEATURE (8)..(8): X is K, R or H for basic amino acids
  MISC_FEATURE (9)..(9): X is I, L or V
  MISC_FEATURE (10)..(10): X is D and E for acidic amino acids
  MISC_FEATURE (11)..(11): X is K, R or H for basic amino acids
  MISC_FEATURE (12)..(12): X is I, L or V
  MISC_FEATURE (13)..(13): X is D and E for acidic amino acids
  MISC_FEATURE (14)..(14): X is A and G
  MISC_FEATURE (15)..(15): X is A and G
  MISC_FEATURE (16)..(16): X is A and G
  MISC_FEATURE (17)..(17): X is A and G
  MISC_FEATURE (18)..(18): X is F or P
  MISC_FEATURE (19)..(19): X is T or S
  MISC_FEATURE (20)..(20): X is K, R or H for basic amino acids
  MISC_FEATURE (21)..(21): X is I, L or V
  MISC_FEATURE (22)..(22): X is F, W or Y for aromatic amino acids
  MISC_FEATURE (23)..(23): X is N or Q for amidated amino acids
  MISC_FEATURE (24)..(24): X is F or P
  MISC_FEATURE (25)..(25): X is T or S
  MISC_FEATURE (26)..(26): X is I, L or V
  MISC_FEATURE (27)..(27): X is I, L or V
  MISC_FEATURE (28)..(28): X is I, L or V
  MISC_FEATURE (29)..(29): X is D and E for acidic amino acids
  MISC_FEATURE (30)..(30): X is M or Nle (Norleucine)
  MISC_FEATURE (31)..(31): X is A and G
  MISC_FEATURE (32)..(32): X is K, R or H for basic amino acids
  MISC_FEATURE (33)..(33): X is I, L or V
  MISC_FEATURE (34)..(34): X is I, L or V
  MISC_FEATURE (35)..(35): X is I, L or V
  MISC_FEATURE (36)..(36): X is D and E for acidic amino acids

SEQ ID NO: 812 - protein, 35 aa, artificial
  Completely synthesized peptide construct
DGQEEKAGVVSTGLIGGGSVKLSIAVKNKAEFHQS

SEQ ID NO: 813 - protein, 33 aa, artificial; identical to SEQ ID NO: 99
  Completely synthesized peptide construct
  MISC_FEATURE (1)..(1): X is acetyl or propionyl group, D glycine or D alanine, cyclohexylalanie at amino terminus
  MISC_FEATURE (2)..(2): X is D and E for acidic amino acids
  MISC_FEATURE (3)..(3): X is A and G
  MISC_FEATURE (4)..(4): X is N or Q for amidated amino acids
  MISC_FEATURE (5)..(5): X is GabaX for X2X3 or X3X2 or X2X3 or X3X2 or X3X3 or X2X2
  MISC_FEATURE (6)..(6): X is K, R or H for basic amino acids
  MISC_FEATURE (7)..(7): X is A and G
  MISC_FEATURE (8)..(8): X is A and G
  MISC_FEATURE (9)..(9): X is GabaX for X2X3 or X3X2 or X2X3 or X3X2 or X3X3 or X2X2
  MISC_FEATURE (10)..(10): X is C or S
  MISC_FEATURE (11)..(11): X is T or S
  MISC_FEATURE (12)..(12): X is A and G
  MISC_FEATURE (13)..(13): X is GabaX for X2X3 or X3X2 or X2X3 or X3X2 or X3X3 or X2X2
  MISC_FEATURE (14)..(14): X is A and G
  MISC_FEATURE (15)..(15): X is A and G
  MISC_FEATURE (16)..(16): X is A and G
  MISC_FEATURE (17)..(17): X is T or S
  MISC_FEATURE (18)..(18): X is I, L or V
  MISC_FEATURE (19)..(19): X is K, R or H for basic amino acids
  MISC_FEATURE (20)..(20): X is I, L or V
  MISC_FEATURE (21)..(21): X is T or S
  MISC_FEATURE (22)..(22): X is I, L or V
  MISC_FEATURE (23)..(23): X is A and G
  MISC_FEATURE (24)..(24): X is I, L or V
  MISC_FEATURE (25)..(25): X is K, R or H for basic amino acids
  MISC_FEATURE (26)..(26): X is N or Q for amidated amino acids
  MISC_FEATURE (27)..(27): X is K, R or H for basic amino acids
  MISC_FEATURE (28)..(28): X is A and G
  MISC_FEATURE (29)..(29): X is D and E for acidic amino acids
  MISC_FEATURE (30)..(30): X is F or P
  MISC_FEATURE (31)..(31): X is K, R or H for basic amino acids
  MISC_FEATURE (32)..(32): X is N or Q for amidated amino acids
  MISC_FEATURE (33)..(33): X is T or S

SEQ ID NO: 814 - protein, 35 aa, artificial
  Completely synthesized peptide construct
DGQEEKAGVVSTGLIGGGNVREGIAFRPASKTFTV

SEQ ID NO: 815 - protein, 33 aa, artificial; identical to SEQ ID NO: 99
  Completely synthesized peptide construct
  MISC_FEATURE (1)..(1): X is acetyl or propiionyl group, D glycine or D alanine, cyclohexylalanine at amino terminus
  MISC_FEATURE (2)..(2): X is D and E for acidic amino acids
  MISC_FEATURE (3)..(3): X is A and G
  MISC_FEATURE (4)..(4): X is N or Q for amidated amino acids
  MISC_FEATURE (5)..(5): X is GabaX for X2X3 or X3X2 or X2X3 or X3X2 or X3X3 or X2X2
  MISC_FEATURE (6)..(6): X is K, R or H for basic amino acids
  MISC_FEATURE (7)..(7): X is A and G
  MISC_FEATURE (8)..(8): X is A and G
  MISC_FEATURE (9)..(9): X is GabaX for X2X3 or X3X2 or X2X3 or X2X2 or X3X3 or X2X2
  MISC_FEATURE (10)..(10): X is C or S
  MISC_FEATURE (11)..(11): X is T or S
  MISC_FEATURE (12)..(12): X is A and G
  MISC_FEATURE (13)..(13): X is GabaX for X2X3 or X3X2 or X2X3 or X3X2 or X3X3 or X2X2
  MISC_FEATURE (14)..(14): X is A and G
  MISC_FEATURE (15)..(15): X is A and G
  MISC_FEATURE (16)..(16): X is A and G
  MISC_FEATURE (17)..(17): X is T or S
  MISC_FEATURE (18)..(18): X is I, L or V
  MISC_FEATURE (19)..(19): X is K, R or H for basic amino acids
  MISC_FEATURE (20)..(20): X is I, L or V
  MISC_FEATURE (21)..(21): X is T or S
  MISC_FEATURE (22)..(22): X is I, L or V
  MISC_FEATURE (23)..(23): X is A and G
  MISC_FEATURE (24)..(24): X is I, L or V
  MISC_FEATURE (25)..(25): X is K, R or H for basic amino acids
  MISC_FEATURE (26)..(26): X is N or Q for amidated amino acids
  MISC_FEATURE (27)..(27): X is K, R or H for basic amino acids
  MISC_FEATURE (28)..(28): X is A and G
  MISC_FEATURE (29)..(29): X is D and E for acidic amino acids
  MISC_FEATURE (30)..(30): X is F or P
  MISC_FEATURE (31)..(31): X is K, R or H for basic amino acids
  MISC_FEATURE (32)..(32): X is N or Q for amidated amino acids
  MISC_FEATURE (33)..(33): X is T or S

SEQ ID NO: 816 - protein, 38 aa, artificial
  Completely synthesized peptide construct
DGQEEKAGVVSTGLIGGGGPTHLFQPSLVLDMAKVLLD

SEQ ID NO: 817 - protein, 36 aa, artificial; identical to SEQ ID NO: 172
  Completely synthesized peptide construct
  MISC_FEATURE (1)..(1): X is acetyl or propionyl group, D glycine or D alanine, cyclohexylalanine at amino terminus
  MISC_FEATURE (2)..(2): X is D and E for acidic amino acids
  MISC_FEATURE (3)..(3): X is A and G
  MISC_FEATURE (4)..(4): X is N or Q for amidated amino acids
  MISC_FEATURE (5)..(5): X is GabaX for X2X3 or X3X2 or X2X3 or X3X2 or X3X3 or X2X2
  MISC_FEATURE (6)..(6): X is K, R or H for basic amino acids
  MISC_FEATURE (7)..(7): X is A and G
  MISC_FEATURE (8)..(8): X is A and G
  MISC_FEATURE (9)..(9): X is GabaX for X2X3 or X3X2 or X2X3 or X3X2 or X3X3 or X2X2
  MISC_FEATURE (10)..(10): X is C or S
  MISC_FEATURE (11)..(11): X is T or S
  MISC_FEATURE (12)..(12): X is A and G
  MISC_FEATURE (13)..(13): X is GabaX for X2X3 or X3X2 or X2X3 or X3X2 or X3X3 or X2X2
  MISC_FEATURE (14)..(14): X is A and G
  MISC_FEATURE (15)..(15): X is A and G
  MISC_FEATURE (16)..(16): X is A and G
  MISC_FEATURE (17)..(17): X is A and G
  MISC_FEATURE (18)..(18): X is F or P
  MISC_FEATURE (19)..(19): X is T or S
  MISC_FEATURE (20)..(20): X is K, R or H for basic amino acids
  MISC_FEATURE (21)..(21): X is I, L or V
  MISC_FEATURE (22)..(22): X is F, W or Y for aromatic amino acids
  MISC_FEATURE (23)..(23): X is N or Q for amidated amino acids
  MISC_FEATURE (24)..(24): X is F or P
  MISC_FEATURE (25)..(25): X is T or S
  MISC_FEATURE (26)..(26): X is I, L or V
  MISC_FEATURE (27)..(27): X is I, L or V
  MISC_FEATURE (28)..(28): X is I, L or V
  MISC_FEATURE (29)..(29): x is D and E for acidic amino acids
  MISC_FEATURE (30)..(30): X is M or Nle (Norleucine)
  MISC_FEATURE (31)..(31): X is A and G
  MISC_FEATURE (32)..(32): X is K, R or H for basic amino acids
  MISC_FEATURE (33)..(33): X is I, L or V
  MISC_FEATURE (34)..(34): X is I, L or V
  MISC_FEATURE (35)..(35): X is I, L or V
  MISC_FEATURE (36)..(36): X is D and E for acidic amino acids

SEQ ID NO: 818 - protein, 23 aa, artificial
  Completely synthesized peptide construct
VQGEESNDKGGGNITEIADLTQK

SEQ ID NO: 819 - protein, 23 aa, artificial
  Completely synthesized peptide construct
  MISC_FEATURE (1)..(1): X is I, L or V
  MISC_FEATURE (2)..(2): X is N or Q for amidated amino acids
  MISC_FEATURE (3)..(3): X is A and G
  MISC_FEATURE (4)..(4): X is D and E for acidic amino acids
  MISC_FEATURE (5)..(5): X is D and E for acidic amino acids
  MISC_FEATURE (6)..(6): X is C or S
  MISC_FEATURE (7)..(7): X is N or Q for amidated amino acids
  MISC_FEATURE (8)..(8): X is D and E for acidic amino acids
  MISC_FEATURE (9)..(9): X is K, R or H for basic amino acids
  MISC_FEATURE (10)..(10): X is A and G
  MISC_FEATURE (11)..(11): X is A and G
  MISC_FEATURE (12)..(12): X is A and G
  MISC_FEATURE (13)..(13): X is N or Q for amidated amino acids
  MISC_FEATURE (14)..(14): X is I, L or V
  MISC_FEATURE (15)..(15): X is T or S
  MISC_FEATURE (16)..(16): X is D and E for acidic amino acids
  MISC_FEATURE (17)..(17): X is I, L or V
  MISC_FEATURE (18)..(18): X is A and G
  MISC_FEATURE (19)..(19): X is D and E for acidic amino acids
  MISC_FEATURE (20)..(20): X is I, L or V
  MISC_FEATURE (21)..(21): X is T or S
  MISC_FEATURE (22)..(22): X is N or Q for amidated amino acids
  MISC_FEATURE (23)..(23): X is K, R or H for basic amino acids
XXXXXXXXXXXXXXXXXXXXXXX

SEQ ID NO: 820 - protein, 27 aa, artificial
  Completely synthesized peptide construct
DLLKNGERIEKVEGGGNITEIADLTQK

SEQ ID NO: 821 - protein, 24 aa, artificial
  Completely synthesized peptide construct
  MISC_FEATURE (1)..(1): X is acetyl or propionyl group, D glycine or D alanine, cyclohexylalanine at amino terminus
  MISC_FEATURE (2)..(2): X is GabaX for X2X3 or X3X2 or X2X3 or X3X2 or X3X3 or X2X2
  MISC_FEATURE (3)..(3): X is K, R or H for basic amino acids
  MISC_FEATURE (4)..(4): X is N or Q for amidated amino acids
  MISC_FEATURE (5)..(5): X is A and G
  MISC_FEATURE (6)..(6): X is D and E for acidic amino acids
  MISC_FEATURE (7)..(7): X is K, R or H for basic amino acids
  MISC_FEATURE (8)..(8): X is GabaX for X2X3 or X3X2 or X2X3 or X3X2 or X3 X3 or X2X2
  MISC_FEATURE (9)..(9): X is K, R or H for basic amino acids
  MISC_FEATURE (10)..(10): X is GabaX for X2X3 or X3X2 or X2X3 or X3X2 or X3X3 or X2X2
  MISC_FEATURE (11)..(11): X is A and G
  MISC_FEATURE (12)..(12): X is A and G
  MISC_FEATURE (13)..(13): X is A and G
  MISC_FEATURE (14)..(14): X is N or Q for amidated amino acids
  MISC_FEATURE (15)..(15): X is I, L or V
  MISC_FEATURE (16)..(16): X is T or S
  MISC_FEATURE (17)..(17): X is D and E for acidic amino acids
  MISC_FEATURE (18)..(18): X is I, L or V
  MISC_FEATURE (19)..(19): X is A and G
  MISC_FEATURE (20)..(20): X is D and E for acidic amino acids
  MISC_FEATURE (21)..(21): X is I, L or V
  MISC_FEATURE (22)..(22): X is T or S
  MISC_FEATURE (23)..(23): X is N or Q for amidated amino acids
  MISC_FEATURE (24)..(24): X is K, R or H for basic amino acids
XXXXXXXXXXXXXXXXXXXXXXXX

SEQ ID NO: 822 - protein, 32 aa, artificial
  Completely synthesized peptide construct
VQGEESNDKGGGGPTHLFQPSLVLDMAKVLLD

SEQ ID NO: 823 - protein, 30 aa, artificial; identical to SEQ ID NO: 58
  Completely synthesized peptide construct
  MISC_FEATURE (1)..(1): X is I, L or V
  MISC_FEATURE (2)..(2): X is N or Q for amidated amino acids
  MISC_FEATURE (3)..(3): X is A and G
  MISC_FEATURE (4)..(4): X is D and E for acidic amino acids
  MISC_FEATURE (5)..(5): X is D and E for acidic amino acids
  MISC_FEATURE (6)..(6): X is C or S
  MISC_FEATURE (7)..(7): X is N or Q for amidated amino acids
  MISC_FEATURE (8)..(8): X is D and E for acidic amino acids
  MISC_FEATURE (9)..(9): X is K, R or H for basic amino acids
  MISC_FEATURE (10)..(10): X is A and G
  MISC_FEATURE (11)..(11): X is A and G
  MISC_FEATURE (12)..(12): X is A and G
  MISC_FEATURE (13)..(13): X is A and G
  MISC_FEATURE (14)..(14): X is F or P
  MISC_FEATURE (15)..(15): X is T or S
  MISC_FEATURE (16)..(16): X is K, R or H for basic amino acids
  MISC_FEATURE (17)..(17): X is I, L or V
  MISC_FEATURE (18)..(18): X is F, W or Y for aromatic amino acids
  MISC_FEATURE (19)..(19): X is N or Q for amidated amino acids
  MISC_FEATURE (20)..(20): X is F or P
  MISC_FEATURE (21)..(21): X is T or S
  MISC_FEATURE (22)..(22): X is I, L or V
  MISC_FEATURE (23)..(23): X is I, L or V
  MISC_FEATURE (24)..(24): X is I, L or V
  MISC_FEATURE (25)..(25): X is D and E for acidic amino acids
  MISC_FEATURE (26)..(26): X is M or Nle (Norleucine)
  MISC_FEATURE (27)..(27): X is A and G
  MISC_FEATURE (28)..(28): X is K, R or H for basic amino acids
  MISC_FEATURE (29)..(29): X is 5-aminopentanoic acid for replacement of 3 or 4 amino acids of X2 or X3
  MISC_FEATURE (30)..(30): X is D and E for acidic amino acids

SEQ ID NO: 824 - protein, 31 aa, artificial
  Completely synthesized peptide construct
DLLKNGERIEKVEGGGDGQEEKAGVVSTGLI

SEQ ID NO: 825 - protein, 24 aa, artificial
  Completely synthesized peptide construct
  MISC_FEATURE (1)..(1): X is acetyl or propionyl group, D glycine or D alanine, cyclohexylalanine at amino terminus
  MISC_FEATURE (2)..(2): X is GabaX for X2X3 or X3X2 or X2X3 or X3X2 or X3X3 or X2X2
  MISC_FEATURE (3)..(3): X is K, R or H for basic amino acids
  MISC_FEATURE (4)..(4): X is N or Q for amidated amino acids
  MISC_FEATURE (5)..(5): X is A and G
  MISC_FEATURE (6)..(6): X is D and E for acidic amino acids
  MISC_FEATURE (7)..(7): X is K, R or H for basic amino acids
  MISC_FEATURE (8)..(8): X is GabaX for X2X3 or X3X2 or X2X3 or X3X2 or X3X3 or X2X2
  MISC_FEATURE (9)..(9): X is K, R or H for basic amino acids
  MISC_FEATURE (10)..(10): X is GabaX for X2X3 or X3X2 or X2X3 or X3X2 or X3X3 or X2X2
  MISC_FEATURE (11)..(11): X is A and G
  MISC_FEATURE (12)..(12): X is A and G
  MISC_FEATURE (13)..(13): X is A and G
  MISC_FEATURE (14)..(14): X is N or Q for amidated amino acids
  MISC_FEATURE (15)..(15): X is I, L or V
  MISC_FEATURE (16)..(16): X is T or S
  MISC_FEATURE (17)..(17): X is D and E for acidic amino acids
  MISC_FEATURE (18)..(18): X is I, L or V
  MISC_FEATURE (19)..(19): X is A and G
  MISC_FEATURE (20)..(20): D and E for acidic amino acids
  MISC_FEATURE (21)..(21): X is I, L or V
  MISC_FEATURE (22)..(22): X is T or S
  MISC_FEATURE (23)..(23): X is N or Q for amidated amino acids
  MISC_FEATURE (24)..(24): X is K, R or H for basic amino acids
XXXXXXXXXXXXXXXXXXXXXXXX

SEQ ID NO: 826 - protein, 27 aa, artificial
  Completely synthesized peptide construct
VQGEESNDKGGGDGQEEKAGVVSTGLI

SEQ ID NO: 827 - protein, 23 aa, artificial
  Completely synthesized peptide construct
  MISC_FEATURE (1)..(1): X is I, L or V
  MISC_FEATURE (2)..(2): X is N or Q for amidated amino acids
  MISC_FEATURE (3)..(3): X is A and G
  MISC_FEATURE (4)..(4): X is D and E for acidic amino acids
  MISC_FEATURE (5)..(5): X is D and E for acidic amino acids
  MISC_FEATURE (6)..(6): X is C or S
  MISC_FEATURE (7)..(7): X is N or Q for amidated amino acids
  MISC_FEATURE (8)..(8): X is D and E for acidic amino acids
  MISC_FEATURE (9)..(9): X is K, R or H for basic amino acids
  MISC_FEATURE (10)..(10): X is A and G
  MISC_FEATURE (11)..(11): X is A and G
  MISC_FEATURE (12)..(12): X is A and G
  MISC_FEATURE (13)..(13): X is N or Q for amidated amino acids
  MISC_FEATURE (14)..(14): X is I, L or V
  MISC_FEATURE (15)..(15): X is T or S
  MISC_FEATURE (16)..(16): X is D and E for acidic amino acids
  MISC_FEATURE (17)..(17): X is I, L or V
  MISC_FEATURE (18)..(18): X is A and G
  MISC_FEATURE (19)..(19): X is D and E for acidic amino acids
  MISC_FEATURE (20)..(20): X is I, L or V
  MISC_FEATURE (21)..(21): X is T or S
  MISC_FEATURE (22)..(22): X is N or Q for amidated amino acids
  MISC_FEATURE (23)..(23): X is K, R or H for basic amino acids
XXXXXXXXXXXXXXXXXXXXXXX

SEQ ID NO: 828 - protein, 34 aa, artificial
  Completely synthesized peptide construct
DLLKNGERIEKVEGGGSVDRSGNVHHQFQKLTLE

SEQ ID NO: 829 - protein, 121 aa, artificial
  Completely synthesized peptide construct
  MISC_FEATURE (1)..(1): X is acetyl or propionyl group, D glycine or D alanine, cyclohexylalanine at amino terminus
  MISC_FEATURE (2)..(2): X is GabaX for X2X3 or X3X2 or X2X3 or X3X2 or X3X3 or X2X2
  MISC_FEATURE (3)..(3): X is K, R or H for basic amino acids
  MISC_FEATURE (4)..(4): X is N or Q for amidated amino acids
  MISC_FEATURE (5)..(5): X is A and G
  MISC_FEATURE (6)..(6): X is D and E for acidic amino acids
  MISC_FEATURE (7)..(7): X is K, R or H for basic amino acids
  MISC_FEATURE (8)..(8): X is GabaX for X2X3 or X3X2 or X2X3 or X3X2 or X3X3 or X2X2
  MISC_FEATURE (9)..(9): X is K, R or H for basic amino acids
  MISC_FEATURE (10)..(10): X is GabaX for X2X3 or X3X2 or X2X3 or X3X2 or X3X3 or X2X2
  MISC_FEATURE (11)..(11): X is A and G
  MISC_FEATURE (12)..(12): X is A and G
  MISC_FEATURE (13)..(13): X is A and G
XXXXXXXXXXXXXKKPGESLKISCQGSGYNFNTYYIAWVRHMPGYGLEWMGIIYPDDSTIRYSPSFQGQVTISADKSTTTAYLQWNSLKASDTAMYYCARRVASALSYWYFDLWGQGTLVT

SEQ ID NO: 830 - protein, 36 aa, artificial
  Completely synthesized peptide construct
DGQEEKAGVVSTGLIGGGSVDRSGNVHHQFQKLTLE

SEQ ID NO: 831 - protein, 95 aa, artificial
  Completely synthesized peptide construct
LVWKKQKDKVAELENSEGGGLEWMGIIYPDDSTIRYSPSFQGQVTISADKSTTTAYLQWNSLKASDTAMYYCARRVASALSYWYFDLWGQGTLVT

SEQ ID NO: 832 - protein, 30 aa, artificial
  Completely synthesized peptide construct
VQGEESNDKGGGSVDRSGNVHHQFQKLTLE

SEQ ID NO: 833 - protein, 88 aa, artificial
  Completely synthesized peptide construct
  MISC_FEATURE (1)..(1): X is acetyl or propionyl group, D glycine or D alanine, cyclohexylalanine at amino terminus
  MISC_FEATURE (2)..(2): X is I, L or V
  MISC_FEATURE (3)..(3): X is N or Q for amidated amino acids
  MISC_FEATURE (4)..(4): X is A and G
  MISC_FEATURE (5)..(5): X is D and E for acidic amino acids
  MISC_FEATURE (6)..(6): X is D and E for acidic amino acids
  MISC_FEATURE (7)..(7): X is C or S
  MISC_FEATURE (8)..(8): X is N or Q for amidated amino acids
  MISC_FEATURE (9)..(9): X is D and E for acidic amino acids
  MISC_FEATURE (10)..(10): X is K, R or H for basic amino acids
  MISC_FEATURE (11)..(11): X is A and G
  MISC_FEATURE (12)..(12): X is A and G
  MISC_FEATURE (13)..(13): X is A and G
XXXXXXXXXXXXXLEWMGIIYPDDSTIRYSPSFQGQVTISADKSTTTAYLQWNSLKASDTAMYYCARRVASALSYWYFDLWGQGTLVT

SEQ ID NO: 834 - protein, 28 aa, artificial
  Completely synthesized peptide construct
DQTQDTEGGGSVDRSGNVHHQFQKLTLE

SEQ ID NO: 835 - protein, 30 aa, artificial
  Completely synthesized peptide construct
AYMTMKIRNGGGSVDRSGNVHHQFQKLTLE

What is claimed is:

1. An immunomodulatory peptide construct having the formula
P₁-x-P₂
where
P₁ is a peptide associated with autoimmune disease, allergy, asthma, host-versus-graft rejection, myocarditis, diabetes, and immune-mediated disease, which binds to an antigen receptor on a set or subset of T cells;
P₂ is a peptide which will cause a Tₕ2 directed immune response by said set or subset of T cells to which the peptide P₁ is attached or which will bind to a T cell receptor which will cause said set or subset of T cells to which the peptide P₁ is attached to initiate, but not complete, an immune response causing said set or subset of T cells to undergo anergy and apoptosis; and
x is a direct bond or linker for covalently bonding P₁ and P₂.

2. The immunomodulatory peptide construct of claim 1 having the formula
P₁-x-P₂
where
P₁ is a peptide associated with autoimmune disease, allergy, asthma, host-versus-graft rejection, myocarditis, diabetes, and immune-mediated disease, which binds to an antigen receptor on a set or subset of T cells selected from the group consisting of SEQ ID NO. 53, SEQ ID NO. 54, SEQ ID NO. 55, SEQ ID NO. 56, SEQ ID NO. 57, SEQ ID NO. 58, SEQ ID NO. 59, SEQ ID NO. 60, SEQ ID NO. 61, SEQ ID NO. 62, SEQ ID NO. 63, SEQ ID NO. 64, SEQ ID NO. 65, SEQ ID NO. 66, SEQ ID NO. 67, SEQ ID NO. 68, SEQ ID NO. 69, SEQ ID NO. 70, SEQ ID NO. 71, SEQ ID NO. 72, SEQ ID NO. 73, SEQ ID NO. 74, SEQ ID NO. 75, SEQ ID NO. 76, SEQ ID NO. 77, SEQ ID NO. 78, SEQ ID NO. 79, SEQ ID NO. 80, SEQ ID NO. 81, SEQ ID NO. 82, SEQ ID NO. 83, SEQ ID NO. 84, SEQ ID NO. 85, SEQ ID NO. 86, SEQ ID NO. 87, SEQ ID NO. 88, SEQ ID NO. 89, SEQ ID NO. 90, SEQ ID NO. 91, SEQ ID NO. 92, SEQ ID NO. 93, SEQ ID NO. 94, SEQ ID NO. 95, SEQ ID NO. 96, SEQ ID NO. 97, SEQ ID NO. 98, SEQ ID NO. 99, SEQ ID NO. 100, SEQ ID NO. 101, SEQ ID NO. 102, SEQ ID NO. 103, SEQ ID NO. 104, SEQ ID NO. 105, SEQ ID NO. 106, SEQ ID NO. 107, SEQ ID NO. 108, SEQ ID NO. 509, SEQ ID NO. 525, SEQ ID NO. 2, SEQ ID NO. 109, SEQ ID NO. 41, SEQ ID NO. 110, SEQ ID NO. 112, SEQ ID NO. 113, SEQ ID NO. 20, SEQ ID NO. 41, SEQ ID NO. 114, SEQ ID NO. 526, SEQ ID NO. 527, SEQ ID NO. 528, SEQ ID NO. 529, SEQ ID NO. 530, SEQ ID NO. 531, SEQ ID NO. 532, SEQ ID NO. 533, SEQ ID NO. 534, SEQ ID NO. 535, SEQ ID NO. 536, SEQ ID NO. 537, SEQ ID NO. 538, SEQ ID NO. 539, SEQ ID NO. 42, SEQ ID NO. 115, SEQ ID NO. 44, SEQ ID NO. 116, SEQ ID NO. 45, SEQ ID NO. 117, SEQ ID NO. 46, SEQ ID NO. 118, SEQ ID NO. 47, SEQ ID NO. 119 and SEQ ID NO. 49.

3. The immunomodulatory peptide construct of claim 1 having the formula
P₁-x-P₂
where
P₂ is a peptide which will cause a Tₕ2 directed immune response by said set or subset of T cells to which the peptide P₁ is attached or which binds to a T cell receptor causing said set or subset of T cells to which the peptide P₁ is attached to initiate, but not complete, an immune response causing said set or subset of T cells to undergo anergy and apoptosis selected from the group consisting of SEQ ID NO. 15, SEQ ID NO. 50, SEQ ID NO. 4, SEQ ID NO. 51, SEQ ID NO. 463, SEQ ID NO. 5, SEQ ID NO. 18, SEQ ID NO. 129, SEQ ID NO. 21, SEQ ID NO. 13 and SEQ ID NO. 51.

4. The immunomodulatory peptide construct of claim 1 having the formula
P₁-x-P₂
where P₁ is a peptide associated with Alzheimer's disease, and the peptide construct P₁-x-P₂ is selected from the group consisting of SEQ ID NO. 141, SEQ ID NO. 143, SEQ ID NO. 145, SEQ ID NO. 147, SEQ ID NO. 149, SEQ ID NO. 151, SEQ ID NO. 153, SEQ ID NO. 155, SEQ ID NO. 221, SEQ ID NO. 223, SEQ ID NO. 225, SEQ ID NO. 227, SEQ ID NO. 229, SEQ ID NO. 231, SEQ ID NO. 233, SEQ ID NO. 235, SEQ ID NO. 301, SEQ ID NO. 303, SEQ ID NO. 305, SEQ ID NO. 307, SEQ ID NO. 309, SEQ ID NO. 311, SEQ ID NO. 313, SEQ ID NO. 315, SEQ ID NO. 381, SEQ ID NO. 383, SEQ ID NO. 385, SEQ ID NO. 387, SEQ ID NO. 389, SEQ ID NO. 391, SEQ ID NO. 393, SEQ ID NO. 395 and SEQ ID NO. 800.

5. The immunomodulatory peptide construct of claim 1 having the formula
P₁-x-P₂
where P₁ is a peptide associated with Dilated Cardiac Myopathy or Experimental Autoimmune Myocarditis and the peptide construct P₁-x-P₂ is selected from the group consisting of SEQ ID NO. 157, SEQ ID NO. 159, SEQ ID NO. 161, SEQ ID NO. 163, SEQ ID NO. 237, SEQ ID NO. 239, SEQ ID NO. 241, SEQ ID NO. 243, SEQ ID NO. 317, SEQ ID NO. 319, SEQ ID NO. 321, SEQ ID NO. 323, SEQ ID NO. 397, SEQ ID NO. 399, SEQ ID NO. 401, SEQ ID NO. 403, SEQ ID NO. 818 and SEQ ID NO. 820.

6. The immunomodulatory peptide construct of claim 1 having the formula
P₁-x-P₂
where P₁ is a peptide associated with diabetes and the peptide construct P₁-x-P₂ is selected from the group consisting of SEQ ID NO. 165, SEQ ID NO. 167, SEQ ID NO. 169, SEQ ID NO. 171, SEQ ID NO. 173, SEQ ID NO. 175, SEQ ID NO. 177, SEQ ID NO. 179, SEQ ID NO. 181, SEQ ID NO. 183, SEQ ID NO. 185, SEQ ID NO. 187, SEQ ID NO. 189, SEQ ID NO. 191, SEQ ID NO. 193, SEQ ID NO. 195, SEQ ID NO. 245, SEQ ID NO. 247, SEQ ID NO. 249, SEQ ID NO. 251, SEQ ID NO. 253, SEQ ID NO. 255, SEQ ID NO. 257, SEQ ID NO. 259, SEQ ID NO. 261, SEQ ID NO. 263, SEQ ID NO. 265, SEQ ID NO. 267, SEQ ID NO. 269, SEQ ID NO. 271, SEQ ID NO. 273, SEQ ID NO. 275, SEQ ID NO. 325, SEQ ID NO. 327, SEQ ID NO. 329, SEQ ID NO. 331, SEQ ID NO. 333, SEQ ID NO. 335, SEQ ID NO. 337, SEQ ID NO. 339, SEQ ID NO. 341, SEQ ID NO. 343, SEQ ID NO. 345, SEQ ID NO. 347, SEQ ID NO. 349, SEQ ID NO. 351, SEQ ID NO. 353, SEQ ID NO. 355, SEQ ID NO. 405, SEQ ID NO. 407, SEQ ID NO. 409, SEQ ID NO. 411, SEQ ID NO. 413, SEQ ID NO. 415, SEQ ID NO. 417, SEQ ID NO. 419, SEQ ID NO. 421, SEQ ID NO. 423, SEQ ID NO. 425, SEQ ID NO. 427, SEQ ID NO. 429, SEQ ID NO. 431, SEQ ID NO. 433, SEQ ID NO. 435, SEQ ID NO. 802, SEQ ID NO. 824 and SEQ ID NO. 826.

7. The immunomodulatory peptide construct of claim 1 having the formula
P₁-x-P₂
where P₁ is a peptide associated with Rheumatoid Arthritis and the peptide construct P₁-x-P₂ is selected from the group consisting of SEQ ID NO. 197, SEQ ID NO. 277, SEQ ID NO. 357, SEQ ID NO. 437 and SEQ ID NO. 804.

8. The immunomodulatory peptide construct of claim 1 having the formula
P₁-x-P₂
where P₁ is a peptide associated with Pemphigus Vulgaris and the peptide construct P₁-x-P₂ is selected from the group consisting of SEQ ID NO. 199, SEQ ID NO. 279, SEQ ID NO. 359, SEQ ID NO. 439, SEQ ID NO. 806, SEQ ID NO. 808, SEQ ID NO. 812 and SEQ ID NO. 814.

9. The immunomodulatory peptide construct of claim 1 having the formula
P₁-x-P₂
where P₁ is a peptide associated with Multiple Sclerosis and the peptide construct P₁-x-P₂ is selected from the group consisting of SEQ ID NO. 201, SEQ ID NO. 205, SEQ ID NO. 207, SEQ ID NO. 281, SEQ ID NO. 285, SEQ ID NO. 287, SEQ ID NO. 361, SEQ ID NO. 365, SEQ ID NO. 367, SEQ ID NO. 441, SEQ ID NO. 445 and SEQ ID NO. 447.

10. The immunomodulatory peptide construct of claim 1 having the formula
P₁-x-P₂
where P₁ is a peptide associated with allergic conditions and the peptide construct P₁-x-P₂ is selected from the group consisting of SEQ ID NO. 209, SEQ ID NO. 211, SEQ ID NO. 213, SEQ ID NO. 215, SEQ ID NO. 217, SEQ ID NO. 219, SEQ ID NO. 289, SEQ ID NO. 291, SEQ ID NO. 293, SEQ ID NO. 295, SEQ ID NO. 297, SEQ ID NO. 299, SEQ ID NO. 369, SEQ ID NO. 371, SEQ ID NO. 373, SEQ ID NO. 375, SEQ ID NO. 377, SEQ ID NO. 379, SEQ ID NO. 449, SEQ ID NO. 451, SEQ ID NO. 453, SEQ ID NO. 455, SEQ ID NO. 457 and SEQ ID NO. 459.

11. The immunomodulatory peptide construct of claim 1 having the formula
P₁-x-P₂
where P₁ is a peptide associated with antiphospholipid conditions and the peptide construct P₁-x-P₂ is selected from the group consisting of SEQ ID NO. 203, SEQ ID NO. 283, SEQ ID NO. 363 and SEQ ID NO. 443.

12. The immunomodulatory peptide construct of claim 1 having the formula
P₁-x-P₂
where P₁ is a peptide associated with uveoretinitis and the peptide construct P₁-x-P₂ is selected from the group consisting of SEQ ID NO. 810, SEQ ID NO. 816 and SEQ ID NO. 822.

13. The immunomodulatory peptide construct of claim 1 having the formula
P₁-x-P₂
where P₁ is a peptide associated with psoriasis and the peptide construct P₁-x-P₂ is selected from the group consisting of SEQ ID NO. 828, SEQ ID NO. 830, SEQ ID NO. 831, SEQ ID NO. 832, SEQ ID NO. 834 and SEQ ID NO. 835.

14. An immunomodulatory peptide construct having the formula
P₃-x-P₄
where P₃ is a peptide construct comprised of X₁ to X₁₄ said peptide P₃ being associated with autoimmune disease, allergy, asthma, host-versus-graft rejection, myocarditis, diabetes, and immune-mediated disease, which binds to an antigen receptor on a set or subset of T cells, and
P₄ is a peptide construct comprised of X₁ to X₁₄ causing a Tₕ2 directed immune response by said set or subset of T cells to which the peptide P₃ is attached or which binds to a T cell receptor causing said set or subset of T cells to which the peptide P₃ is attached to initiate, but not complete, an immune response causing said set or subset of T cells to undergo anergy and apoptosis;
X₁ to X₁₀ and X₁₄ describe a group of amino acids based on their features and X₁₁ to X₁₃ describe modifications to the peptide construct, wherein
X₁ is selected from the group consisting of Ala and Gly,
X₂ is selected from the group consisting of Asp and Glu,
X₃ is selected from the group consisting of Ile, Leu and Val,
X₄ is selected from the group consisting of Lys, Arg and His,
X₅ is selected from the group consisting of Cys and Ser,
X₆ is selected from the group consisting of Phe, Trp and Tyr,
X₇ is selected from the group consisting of Phe and Pro,
X₈ is selected from the group consisting of Met and Nle,
X₉ is selected from the group consisting of Asn and Gln,
X₁₀ is selected from the group consisting of Thr and Ser,
X₁₁ Gaba^{χ} where X₂X₃, X₃X₂, X₂X₃, X₃X₂, X₃X₃, or X₂X₂ can be substituted with X₁₁;
X₁₂ is selected from the group consisting of acetyl, propionyl group, D glycine, D alanine and cyclohexylalanine;
X₁₃ is 5-aminopentanoic where any combination of 3 to 4 amino acids of X₂ and X₃ can be replaced with X₁₃;
X₁₄ is selected from the group consisting of X₁, X₂, X₃, X₄, X₅, X₆, X₇, X₈, X₉ and X₁₀; and
x is a direct bond or linker for covalently bonding P₃ and P₄.

15. The immunomodulatory peptide construct of claim 14 having the formula
P₃-x-P₄
where P₃ is a peptide associated with Alzheimer's disease, and the peptide construct P₃-x-P₄ is selected from the group consisting of SEQ ID NO. 142, SEQ ID NO. 144, SEQ ID NO. 146, SEQ ID NO. 148, SEQ ID NO. 150, SEQ ID NO. 152, SEQ ID NO. 154, SEQ ID NO. 156, SEQ ID NO. 222, SEQ ID NO. 224, SEQ ID NO. 226, SEQ ID NO. 228, SEQ ID NO. 230, SEQ ID NO. 232, SEQ ID NO. 234, SEQ ID NO. 236, SEQ ID NO. 302, SEQ ID NO. 304, SEQ ID NO. 306, SEQ ID NO. 308, SEQ ID NO. 310, SEQ ID NO. 312, SEQ ID NO. 314, SEQ ID NO. 316, SEQ ID NO. 382, SEQ ID NO. 384, SEQ ID NO. 386, SEQ ID NO. 388, SEQ ID NO. 390, SEQ ID NO. 392, SEQ ID NO. 394 and SEQ ID NO. 396.

16. The immunomodulatory peptide construct of claim 14 having the formula
P₃-x-P₄
where P₃ is a peptide associated with Dilated Cardiac Myopathy or Experimental Autoimmune Myocarditis and the peptide construct P₃-x-P₄ is selected from the group consisting of SEQ ID NO. 158, SEQ ID NO. 160, SEQ ID NO. 162, SEQ ID NO. 164, SEQ ID NO. 238, SEQ ID NO. 240, SEQ ID NO. 242, SEQ ID NO. 244, SEQ ID NO. 318, SEQ ID NO. 320, SEQ ID NO. 322, SEQ ID NO. 324, SEQ ID NO. 398, SEQ ID NO. 400, SEQ ID NO. 402, SEQ ID NO. 404, SEQ ID NO. 801, SEQ ID NO. 819 and SEQ ID NO. 821.

17. The immunomodulatory peptide construct of claim 14 having the formula
P₃-x-P₄
where P₃ is a peptide associated with diabetes and the peptide construct P₃-x-P₄ is selected from the group consisting of SEQ ID NO. 166, SEQ ID NO. 168, SEQ ID NO. 170, SEQ ID NO. 172, SEQ ID NO. 174, SEQ ID NO. 176, SEQ ID NO. 178, SEQ ID NO. 180, SEQ ID NO. 182, SEQ ID NO. 184, SEQ ID NO. 186, SEQ ID NO. 188, SEQ ID NO. 190, SEQ ID NO. 192, SEQ ID NO. 194, SEQ ID NO. 196, SEQ ID NO. 246, SEQ ID NO. 248, SEQ ID NO. 250, SEQ ID NO. 252, SEQ ID NO. 254, SEQ ID NO. 256, SEQ ID NO. 258, SEQ ID NO. 260, SEQ ID NO. 262, SEQ ID NO. 264, SEQ ID NO. 266, SEQ ID NO. 268, SEQ ID NO. 270, SEQ ID NO. 272, SEQ ID NO. 274, SEQ ID NO. 276, SEQ ID NO. 326, SEQ ID NO. 328, SEQ ID NO. 330, SEQ ID NO. 332, SEQ ID NO. 334, SEQ ID NO. 336, SEQ ID NO. 338, SEQ ID NO. 340, SEQ ID NO. 342, SEQ ID NO. 344, SEQ ID NO. 346, SEQ ID NO. 348, SEQ ID NO. 350, SEQ ID NO. 352, SEQ ID NO. 354, SEQ ID NO. 356, SEQ ID NO. 406, SEQ ID NO. 408, SEQ ID NO. 410, SEQ ID NO. 412, SEQ ID NO. 414, SEQ ID NO. 416, SEQ ID NO. 418, SEQ ID NO. 420, SEQ ID NO. 422, SEQ ID NO. 424, SEQ ID NO. 426, SEQ ID NO. 428, SEQ ID NO. 430, SEQ ID NO. 432, SEQ ID NO. 434, SEQ ID NO. 436, SEQ ID NO. 803, SEQ ID NO. 825 and SEQ ID NO. 827.

18. The immunomodulatory peptide construct of claim 14 having the formula
P₃-x-P₄
where P₃ is a peptide associated with Rheumatoid Arthritis and the peptide construct P₃-x-P₄ is selected from the group consisting of SEQ ID NO. 198, SEQ ID NO. 278, SEQ ID NO. 358, SEQ ID NO. 438 and SEQ ID NO. 805.

19. The immunomodulatory peptide construct of claim 14 having the formula
P₃-x-P₄
where P₃ is a peptide associated with Pemphigus Vulgaris and the peptide construct P₃-x-P₄ is selected from the group consisting of SEQ ID NO. 200, SEQ ID NO. 280, SEQ ID NO. 360, SEQ ID NO. 440, SEQ ID NO. 807, SEQ ID NO. 809, SEQ ID NO. 813 and SEQ ID NO. 815.

20. The immunomodulatory peptide construct of claim 14 having the formula
P₃-x-P₄
where P₃ is a peptide associated with Multiple Sclerosis and the peptide construct P₃-x-P₄ is selected from the group consisting of SEQ ID NO. 202, SEQ ID NO. 206, SEQ ID NO. 208, SEQ ID NO. 282, SEQ ID NO. 286, SEQ ID NO. 288, SEQ ID NO. 362, SEQ ID NO. 366, SEQ ID NO. 368, SEQ ID NO. 442, SEQ ID NO. 446 and SEQ ID NO. 448.

21. The immunomodulatory peptide construct of claim 14 having the formula
P₃-x-P₄
where P₃ is a peptide associated with allergic conditions and the peptide construct P₃-x-P₄ is selected from the group consisting of SEQ ID NO. 210, SEQ ID NO. 212, SEQ ID NO. 214, SEQ ID NO. 216, SEQ ID NO. 218, SEQ ID NO. 220, SEQ ID NO. 290, SEQ ID NO. 292, SEQ ID NO. 294, SEQ ID NO. 296, SEQ ID NO. 298, SEQ ID NO. 300, SEQ ID NO. 370, SEQ ID NO. 372, SEQ ID NO. 374, SEQ ID NO. 376, SEQ ID NO. 378, SEQ ID NO. 380, SEQ ID NO. 450, SEQ ID NO. 452, SEQ ID NO. 454, SEQ ID NO. 456, SEQ ID NO. 458 and SEQ ID NO. 460.

22. The immunomodulatory peptide construct of claim 14 having the formula
P₃-x-P₄
where P₃ is a peptide associated with antiphospholipid conditions and the peptide construct P₃-x-P₄ is selected from the group consisting of SEQ ID NO. 204, SEQ ID NO. 284, SEQ ID NO. 364, and SEQ ID NO. 444.

23. The immunomodulatory peptide construct of claim 14 having the formula
P₃-x-P₄
where P₃ is a peptide associated with uveoretinitis and the peptide construct P₃-x-P₄ is selected from the group consisting of SEQ ID NO. 811, SEQ ID NO. 817 and SEQ ID NO. 823.

24. The immunomodulatory peptide construct of claim 14 having the formula
P₃-x-P₄
where P₃ is a peptide associated with psoriasis and the peptide construct P₃-x-P₄ is selected from the group consisting of SEQ ID NO. 829 and SEQ ID NO. 833.
